(19) United States
(12) Patent Application Publication
(10) Pub. No.: US 2009/0312410 A1
(43) Pub. Date: Dec. 17, 2009

(54) Genetic polymorphisms associated with coronary heart disease, methods of detection and uses thereof

(75) Inventors: Dov Shiffman, Palo Alto, CA (US); James J. Devlin, Lafayette, CA (US)

Correspondence Address: CELERA CORPORATION, 1401 HARBOR BAY PARKWAY, ALAMEDA, CA, 94502, US

(73) Assignee: APPLERA CORPORATION, Norwalk, CT (US)

(21) Appl. No.: 11/788,862

(22) Filed: Apr. 20, 2007

Related U.S. Application Data
(60) Provisional application No. 60/794,300, filed on Apr. 21, 2006.

(51) Int. Cl. A61K 31/351; C12Q 1/68; C07H 21/04; C07K 14/47; C07K 16/18; G01N 33/68

(52) U.S. Cl. 514/460; 435/6; 536/23.5; 530/350; 530/387.9; 536/24.31; 536/24.33; 436/86

(57) ABSTRACT

The present invention is based on the discovery of genetic polymorphisms that are associated with coronary heart disease, specifically MI and including early-onset MI, and response to drug treatment. In particular, the present invention relates to nucleic acid molecules containing the polymorphisms, variant proteins encoded by such nucleic acid molecules, reagents for detecting the polymorphic nucleic acid molecules and proteins, and methods of using the nucleic acid and proteins as well as methods of using reagents for their detection.

### CROSS-REFERENCE TO RELATED APPLICATIONS

[0001] This application claims the benefit of U.S. provisional application Ser. No. 60/794,300, filed on Apr. 21, 2006, the contents of which are hereby incorporated by reference in its entirety into this application.

### FIELD OF THE INVENTION

[0002] The present invention is in the field of coronary heart disease (CHD) and in particular myocardial infarction (MI) diagnosis and therapy. In particular, the present invention relates to specific single nucleotide polymorphisms (SNPs) in the human genome, and their association with CHD and related pathologies. Based on differences in allele frequencies in the patient population relative to normal individuals, the naturally-occurring SNPs disclosed herein can be used as targets for the design of diagnostic reagents and the development of therapeutic agents, as well as for disease association and linkage analysis. In particular, the SNPs of the present invention are useful for identifying an individual who is at an increased or decreased risk of developing CHD and in particular MI, for early detection of the disease, for providing clinically important information for the prevention and/or treatment of CHD such as MI, for screening and selecting therapeutic agents and for predicting a patient's response to therapeutic agents. The SNPs disclosed herein are also useful for human identification applications. Methods, assays, kits, and reagents for detecting the presence of these polymorphisms and their encoded products are provided.

### BACKGROUND OF THE INVENTION

[0003] CHD is defined in the Framingham study as encompassing angina, MI, coronary insufficiency (which is manifested as ischemia, that is, impaired oxygen flow to the heart muscle), stenosis and coronary heart disease death. Wilson et al., Circulation 97:1837-1847 (1998). It is sometimes recorded through clinical records that indicate the following interventions: coronary artery bypass graft, angioplasty and stent placement in addition to clinical records of MI, angina, or coronary death. This latter definition is used in many population based studies and clinical trials, but it probably misses silent MI events and some unreported angina.

[0004] MI (or heart attack) is the most common cause of mortality in developed countries. The incidence of MI is still high despite currently available preventive measures and therapeutic intervention. More than 1,500,000 people in the U.S. suffer acute MI each year, many without seeking help due to unrecognized MI, and one third of these people die. The lifetime risk of coronary artery disease events at age 40 is 42.4% for men, nearly one in two, and 24.9% for women, or one in four. D. M. Lloyd-Jones, Lancet 353:89-92 (1999).

[0005] MI is a multifactorial disease that involves atherogenesis, thrombus formation and propagation. Thrombosis can result in complete or partial occlusion of coronary arteries. The luminal narrowing or blockage of coronary arteries reduces oxygen and nutrient supply to the cardiac muscle (cardiac ischemia), leading to myocardial necrosis and/or stunning. MI, unstable angina, and sudden ischemic death are clinical manifestations of cardiac muscle damage. All three endpoints are part of the acute coronary syndrome since the underlying mechanisms of acute complications of atherosclerosis are considered to be the same.

[0006] Atherogenesis, the first step of pathogenesis of MI, is a complex interaction between blood elements, mechanical forces, disturbed blood flow, and vessel wall abnormality that results in plaque accumulation. An unstable (vulnerable) plaque was recognized as an underlying cause of arterial thrombotic events and MI. A vulnerable plaque is a plaque, often not stenotic, that has a high likelihood of becoming disrupted or eroded, thus forming a thrombogenic focus. MI due to a vulnerable plaque is a complex phenomenon that includes: plaque vulnerability, blood vulnerability (hypercoagulation, hypothrombolysis), and heart vulnerability (sensitivity of the heart to ischemia or propensity for arrhythmia). Recurrent myocardial infarction (RMI) can generally be viewed as a severe form of MI progression caused by multiple vulnerable plaques that are able to undergo pre-rupture or a pre-erosive state, coupled with extreme blood coagulability.

[0007] The current diagnosis of MI is based on the levels of troponin I or T that indicate the cardiac muscle progressive necrosis, impaired electrocardiogram (ECG), and detection of abnormal ventricular wall motion or angiographic data (the presence of acute thrombi). However, due to the asymptomatic nature of 25% of acute MIs (absence of atypical chest pain, low ECG sensitivity), a significant portion of MIs are not diagnosed and therefore not treated appropriately (e.g., prevention of recurrent MIs).

[0008] MI risk assessment and prognosis is currently done using classic risk factors or the recently introduced Framingham Risk Index. Both of these assessments put a significant weight on LDL levels to justify preventive treatment. However, it is well established that half of all MIs occur in individuals without overt hyperlipidemia.

[0009] Other emerging risk factors of MI are inflammatory biomarkers such as C-reactive protein (CRP), ICAM-1, SAA, TNF α, homocysteine, impaired fasting glucose, new lipid markers (ox LDL, Lp-a, MAD-LDL, etc.) and pro-thrombotic factors (fibrinogen, PAI-1). These markers have significant limitations such as low specificity and low positive predictive value, and the need for multiple reference intervals to be used for different groups of people (e.g., males-females, smokers-non smokers, hormone replacement therapy users, different age groups). These limitations diminish the utility of such markers as independent prognostic markers for MI screening.

[0010] Genetics plays an important role in MI risk. Families with a positive family history of MI account for 14% of the general population, 72% of premature MIs, and 48% of all MIs. R. R. Williams, Am J Cardiology 87:129 (2001). In addition, replicated linkage studies have revealed evidence of multiple regions of the genome that are associated with MI and relevant to MI genetic traits, including regions on chromosomes 14, 2, 3 and 7, implying that genetic risk factors influence the onset, manifestation, and progression of MI. U. Broeckel, Nature Genetics 30:210 (2002); S. Harrap, Arterioscler Thromb Vasc Biol 22:874-878 (2002); A. Shearman, Human Molecular Genetics 9:1315-1320 (2000). Recent association studies have identified allelic variants that are associated with acute complications of CHD, including allelic variants of the ApoE, ApoA5, Lpa, APOCIII, and Klotho genes.

[0011] Genetic markers such as single nucleotide polymorphisms (SNPS) are preferable to other types of biomarkers. Genetic markers that are prognostic for MI can be genotyped early in life and could predict individual response to various risk factors. The combination of serum protein levels and genetic predisposition revealed by genetic analysis of susceptibility genes can provide an integrated assessment of the interaction between genotypes and environmental factors, resulting in synergistically increased prognostic value of diagnostic tests.

[0012] Thus, there is an urgent need for novel genetic markers that are predictive of predisposition to CHD such as MI, particularly for individuals who are unrecognized as having a predisposition to MI. Such genetic markers may enable prognosis of MI in much larger populations compared with the populations that can currently be evaluated by using existing risk factors and biomarkers. The availability of a genetic test may allow, for example, appropriate preventive treatments for acute coronary events to be provided for susceptible individuals (such preventive treatments may include, for example, statin treatments and statin dose escalation, as well as changes to modifiable risk factors), lowering of the thresholds for ECG and angiography testing, and allow adequate monitoring of informative biomarkers. Moreover, the discovery of genetic markers associated with MI will provide novel targets for therapeutic intervention or preventive treatments of MI, and enable the development of new therapeutic agents for treating MI and other cardiovascular disorders.

[0013] Early-Onset MI

[0014] “Early-onset MI” is defined as MI in men of age<55 and women<65. K. O. Akosah et al., “Preventing myocardial infarction in the young adult in the first place: How do the National Cholesterol Education Panel III guidelines perform?” JACC 41(9):1475-1479 (2003). It is important to note that patients who experience early-onset MI may not be effectively identified by current cholesterol treatment guidelines, such as those suggested by the National Cholesterol Education Program. In one study, for example, a significant number of patients who suffered MI at an earlier age (≦50 years) were shown to have LDL cholesterol below 100 mg/dl. K. O. Akosah et al., “Myocardial infarction in young adults with low-density lipoprotein cholesterol levels less than or equal to 100 mg/dl. Clinical profile and 1-year outcomes.” Chest 120:1953-1958 (2001). Because risk for MI can be reduced by lifestyle changes and by treatment of modifiable risk factors, better methods to identify patients at risk for early-onset MI could be useful for making treatment decisions, especially considering that these patients may not be identified for medical management by conventional treatment guidelines.

[0015] Genetic markers for risk of early-onset MI could potentially be incorporated into individual risk assessment protocols, as they have the advantage of being easily detected at any age. Yet there is currently no consensus on which genetic markers, if any, are suitable for identification of early-onset MI risk. In this example 11,647 putatively functional single nucleotide polymorphisms (SNPs) were investigated in case-control studies of early-onset MI, to determine which SNPs are associated with early-onset MI.

[0016] Coronary Stenosis

[0017] Coronary stenosis is the narrowing of coronary arteries by obstructive atherosclerotic plaques. The coronary arteries supply oxygenated blood flow to the myocardium. Although mild and moderate coronary stenosis do not impede resting coronary flow, stenosis>30-45% starts to restrict maximal coronary flow. Severe coronary stenosis (>70% reduction in luminal diameter) causes stable angina (ischemic chest pain upon exertion). Significant stenosis contributes, along with plaque rupture and thrombus formation, coronary spasm, or inflammation/infection, to unstable angina as well as myocardial infarction. Together with arrhythmia, coronary stenosis is a major factor of sudden cardiac deaths, as evidenced by its presence in two or more major coronary arteries in 90% of adult sudden cardiac death victims.

[0018] Coronary stenosis is a prevalent disease. Each year in the United States, 440,000 new cases of stable angina and 150,000 new cases of unstable angina occur. This year, an estimated 1.1 million Americans will have a new or recurrent heart attack. These incidences result in over six million individuals in the U.S. living with stable or unstable angina pectoris, a debilitating condition, and over seven million individuals in the U.S. living with a history of myocardial infarction. Coronary stenosis is frequently a deadly disease. It is a major underlying cause of CHD, which is the single largest cause of death in the U.S. Over half a million coronary deaths, including 250,000 sudden cardiac deaths, occur each year in U.S.

[0019] There is, therefore, an unmet need in early diagnosis and prognosis of asymptomatic coronary stenosis. This need is particularly significant given that early diagnosis or prognosis results can significantly influence the course of disease by influencing treatment choices (for example, those with genetic risks can be treated to modify risk factors such as hypertension, diabetes, inactivity, dyslipidemia, etc.), thresholds (e.g., lipid levels used to trigger the use of lipid-lowering drugs), and goals (e.g., target blood pressure or lipid levels), and possibly enhance compliance.

[0020] Diagnosis of coronary stenosis currently starts by assessing if the risk profiles (e.g., hypertension, dyslipidemia, family history, diabetes, etc.) and symptoms (e.g., angina) of patients are consistent with coronary heart disease, followed most commonly by resting and exercise EKGs. However, risk assessments and EKGs are imperfect diagnostic tests for stenosis since they can be both insensitive (giving false negatives) and non-specific (giving false positives). Coronary arteriography is the definitive test for assessing the severity of coronary stenosis, however, it is not very sensitive in early detection of mild stenosis. It is also an invasive procedure with a small risk of death due to the catheterization procedure and the contrast dye. Because of this risk, it is typically only used at a time when coronary stenosis is considered likely from symptoms or other tests, which is hardly an ideal time to start intervention.

[0021] Coronary stenosis risk is presumed to have a strong genetic component. It is well known that several major risk factors of coronary disease are heritable, e.g. serum lipid levels (L. Perusse et al., Arterioscler Thromb Vasc Biol 17(11):3263-9 (1997)), and obesity (T. Rice et al., Int J Obes Relat Metab Disord 21(11):1024-31 (1997)). Indeed, several known genetic defects are individually sufficient to cause elevated serum LDL-cholesterol (e.g., familial hypercholesterolemia) leading to premature coronary disease. Goldstein and Brown, Science 292: 1310-12 (2001)). In addition, linkage studies in humans have replicated the findings of the link of several chromosomal regions (quantitative trait loci) to coronary heart disease and related diseases and risk factors. P. Pajukanta et al., Am J Hum Genet. 67:1481-93 (2000); S. Francke et al., Human Molecular Genetics 10(24):2751-65 (2001). Finally, a family history of premature coronary disease is a significant factor in the risk assessment and diagnosis of coronary disease. E. Braunwald, D. Zipes and P. Libby, Heart Disease, 6^{th} ed., W.B. Saunders Company 28 (2001).

[0022] Although many risk factors for coronary stenosis have been identified, including age, diabetes, hypertension, high serum cholesterol, smoking, etc., and genetic factors play significant roles in several of these risk factors, significant genetic risk factors are likely to exist which have not been identified to date. In addition to the anecdotal coronary disease patients that exhibit few traditional risk factors, a study of multiple existing risk factors showed that only half of the “population-attributable risk” was attributable to known risk factors. M. Change et al., J Clin Epidemiol 54(6):634-44 (2001). Therefore, the presently known risk factors are inadequate for predicting coronary stenosis risk in individuals. Given the magnitude of the disease, there is an urgent need for genetic markers that are predictive of coronary stenosis risk. Such genetic markers could increase the prognostic ability of existing risk assessment methods and complement current diagnostic methods such as exercise EKG, especially in early detection of disease when intervention is most effective and should ideally start.

[0023] Reduction of coronary and cerebrovascular events and total mortality by treatment with HMG-CoA reductase inhibitors (statins) has been demonstrated in a number of randomized, double blinded, placebo controlled prospective trials. D. D. Waters, Clin Cardiol 24 (8 Suppl):III3-7 (2001); B. K. Singh and J. L. Mehta, Curr Opin Cardiol 17(5):503-11 (2002). These drugs have their primary effect through the inhibition of hepatic cholesterol synthesis, thereby upregulating LDL receptor in the liver. The resultant increase in LDL catabolism results in decreased circulating LDL, a major risk factor for cardiovascular disease.

[0024] Statins can be divided into two types according to their physicochemical and pharmacokinetic properties. Statins such as lovastatin, simvastatin, atorvastatin, and cerevastatin are hydrophobic in nature and, as such, diffuse across membranes and thus are highly cell permeable. Hydrophilic statins such as pravastatin are more polar, such that they require specific cell surface transporters for cellular uptake. K. Ziegler and W. Stunkel, Biochim Biophys Acta 1139(3):203-9 (1992); M. Yamazaki et al., Am J Physiol 264(1 Pt 1):G36-44 (1993); T. Komai et al., Biochem Pharmacol 43(4):667-70 (1992). The latter statin utilizes a transporter, OATP2, whose tissue distribution is confined to the liver and, therefore, they are relatively hepato-specific inhibitors. B. Hsiang et al., J Biol Chem 274(52):37161-37168 (1999). The former statins, not requiring specific transport mechanisms, are available to all cells and they can directly impact a much broader spectrum of cells and tissues. These differences in properties may influence the spectrum of activities that each statin possesses. Pravastatin, for instance, has a low myopathic potential in animal models and myocyte cultures compared to other hydrophobic statins. B. A. Masters et al., Toxicol Appl Pharmacol 131(1):163-174 (1995); K. Nakahara et al., Toxicol Appl Pharmacol 152(1):99-106 (1998); J. C. Reijneveld et al., Pediatr Res 39(6):1028-1035 (1996).

[0025] Evidence from gene association studies is accumulating to indicate that responses to drugs are, indeed, at least partly under genetic control. As such, pharmacogenetics—the study of variability in drug responses attributed to hereditary factors in different populations—may significantly assist in providing answers toward meeting this challenge. A. D. Roses, Nature 405(6788):857-865 (2000); V. Mooser et al., J Thromb Haemost 1(7):1398-1402 (2003); L. M. Humma and S. G. Terra, Am J Health Syst Pharm 59(13): 1241-1252 (2002). Numerous associations have been reported between selected genotypes, as defined by SNPs and other sequence variations and specific responses to cardiovascular drugs. Polymorphisms in several genes have been suggested to influence responses to statins including CETP (J. A. Kuivenhoven et al., N Engl J Med 338(2):86-93 (1998)), beta-fibrinogen (M. P. de Maat et al., Arterioscler Thromb Vasc Biol 18(2):265-71 (1998)), hepatic lipase (A. Zambon et al., Circulation 103(6):792-798 (2001)), lipoprotein lipase (J. W. Jukema et al., Circulation 94(8):1913-1918 (1996)), glycoprotein 111a (P. F. Bray et al., Am J Cardiol 88(4):347-352 (2001)), stromelysin-1 (M. P. de Maat et al., Am J Cardiol 83(6):852-856 (1999)), and apolipoprotein E (L. U. Gerdes et al., Circulation 101(12):1366-1371 (2000); J. Pedro-Botet et al., Atherosclerosis 158(1):183-193 (2001)). Some of these variants were shown to effect clinical events while others were associated with changes in surrogate endpoints. Thus there is the need for markers and individuals responsiveness to statins.

[0026] SNPs

[0027] The genomes of all organisms undergo spontaneous mutation in the course of their continuing evolution, generating variant forms of progenitor genetic sequences. Gusella, Ann Rev Biochem 55:831-854 (1986). A variant form may confer an evolutionary advantage or disadvantage relative to a progenitor form or may be neutral. In some instances, a variant form confers an evolutionary advantage to the species and is eventually incorporated into the DNA of many or most members of the species and effectively becomes the progenitor form. Additionally, the effects of a variant form may be both beneficial and detrimental, depending on the circumstances. For example, a heterozygous sickle cell mutation confers resistance to malaria, but a homozygous sickle cell mutation is usually lethal. In many cases, both progenitor and variant forms survive and co-exist in a species population. The coexistence of multiple forms of a genetic sequence gives rise to genetic polymorphisms, including SNPs.

[0028] Approximately 90% of all genetic polymorphisms in the human genome are SNPs. SNPs are single base positions in DNA at which different alleles, or alternative nucleotides, exist in a population. The SNP position (interchangeably referred to herein as SNP, SNP site, SNP locus, SNP marker, or marker) is usually preceded by and followed by highly conserved sequences of the allele (e.g., sequences that vary in less than 1/100 or 1/1000 members of the populations). An individual may be homozygous or heterozygous for an allele at each SNP position. A SNP can, in some instances, be referred to as a “cSNP” to denote that the nucleotide sequence containing the SNP is an amino acid coding sequence.

[0029] A SNP may arise from a substitution of one nucleotide for another at the polymorphic site. Substitutions can be transitions or transversions. A transition is the replacement of one purine nucleotide by another purine nucleotide, or one pyrimidine by another pyrimidine. A transversion is the replacement of a purine by a pyrimidine, or vice versa. A SNP may also be a single base insertion or deletion variant referred to as an “indel.” Weber et al., “Human diallelic insertion/deletion polymorphisms,” Am J Hum Genet. 71(4):854-62 (October 2002).

[0030] A synonymous codon change, or silent mutation/SNP (terms such as “SNP,” “polymorphism,” “mutation,” “mutant,” “variation,” and “variant” are used herein interchangeably), is one that does not result in a change of amino acid due to the degeneracy of the genetic code. A substitution that changes a codon coding for one amino acid to a codon coding for a different amino acid (i.e., a non-synonymous codon change) is referred to as a missense mutation. A nonsense mutation results in a type of non-synonymous codon change in which a stop codon is formed, thereby leading to premature termination of a polypeptide chain and a truncated protein. A read-through mutation is another type of non-synonymous codon change that causes the destruction of a stop codon, thereby resulting in an extended polypeptide product. While SNPs can be bi-, tri-, or tetra-allelic, the vast majority of the SNPs are bi-allelic, and are thus often referred to as “bi-allelic markers,” or “di-allelic markers.”

[0031] As used herein, references to SNPs and SNP genotypes include individual SNPs and/or haplotypes, which are groups of SNPs that are generally inherited together. Haplotypes can have stronger correlations with diseases or other phenotypic effects compared with individual SNPs, and therefore may provide increased diagnostic accuracy in some cases. Stephens et al., Science 293:489-493 (July 2001).

[0032] Causative SNPs are those SNPs that produce alterations in gene expression or in the expression, structure, and/or function of a gene product, and therefore are most predictive of a possible clinical phenotype. One such class includes SNPs falling within regions of genes encoding a polypeptide product, i.e. cSNPs. These SNPs may result in an alteration of the amino acid sequence of the polypeptide product (i.e., non-synonymous codon changes) and give rise to the expression of a defective or other variant protein. Furthermore, in the case of nonsense mutations, a SNP may lead to premature termination of a polypeptide product. Such variant products can result in a pathological condition, e.g., genetic disease. Examples of genes in which a SNP within a coding sequence causes a genetic disease include sickle cell anemia and cystic fibrosis.

[0033] Causative SNPs do not necessarily have to occur in coding regions; causative SNPs can occur in, for example, any genetic region that can ultimately affect the expression, structure, and/or activity of the protein encoded by a nucleic acid. Such genetic regions include, for example, those involved in transcription, such as SNPs in transcription factor binding domains, SNPs in promoter regions, in areas involved in transcript processing, such as SNPs at intron-exon boundaries that may cause defective splicing, or SNPs in mRNA processing signal sequences such as polyadenylation signal regions. Some SNPs that are not causative SNPs nevertheless are in close association with, and therefore segregate with, a disease-causing sequence. In this situation, the presence of a SNP correlates with the presence of, or predisposition to, or an increased risk in developing the disease. These SNPs, although not causative, are nonetheless also useful for diagnostics, disease predisposition screening, and other uses.

[0034] An association study of a SNP and a specific disorder involves determining the presence or frequency of the SNP allele in biological samples from individuals with the disorder of interest, such as MI, and comparing the information to that of controls (i.e., individuals who do not have the disorder; controls may be also referred to as “healthy” or “normal” individuals) who are preferably of similar age and race. The appropriate selection of patients and controls is important to the success of SNP association studies. Therefore, a pool of individuals with well-characterized phenotypes is extremely desirable.

[0035] A SNP may be screened in diseased tissue samples or any biological sample obtained from a diseased individual, and compared to control samples, and selected for its increased (or decreased) occurrence in a specific pathological condition, such as pathologies related to CHD and in particular, MI. Once a statistically significant association is established between one or more SNP(s) and a pathological condition (or other phenotype) of interest, then the region around the SNP can optionally be thoroughly screened to identify the causative genetic locus/sequence(s) (e.g., causative SNP/mutation, gene, regulatory region, etc.) that influences the pathological condition or phenotype. Association studies may be conducted within the general population and are not limited to studies performed on related individuals in affected families (linkage studies).

[0036] Clinical trials have shown that patient response to treatment with pharmaceuticals is often heterogeneous. There is a continuing need to improve pharmaceutical agent design and therapy. In that regard, SNPs can be used to identify patients most suited to therapy with particular pharmaceutical agents (this is often termed “pharmacogenomics”). Similarly, SNPs can be used to exclude patients from certain treatment due to the patient's increased likelihood of developing toxic side effects or their likelihood of not responding to the treatment. Pharmacogenomics can also be used in pharmaceutical research to assist the drug development and selection process. Linder et al., Clinical Chemistry 43:254 (1997); Marshall, Nature Biotechnology 15:1249 (1997); International Patent Application WO 97/40462, Spectra Biomedical; and Schafer et al., Nature Biotechnology 16:3 (1998).

### SUMMARY OF THE INVENTION

[0037] The present invention relates to the identification of novel SNPs, unique combinations of such SNPs, and haplotypes of SNPs that are associated with CHD, and in particular MI. The polymorphisms disclosed herein are directly useful as targets for the design of diagnostic reagents and the development of therapeutic agents for use in the diagnosis and treatment of CHD, in particular MI, as well as predicting a patient's response to therapeutic agents such as statins.

[0038] Based on the identification of SNPs associated with CHD, the present invention also provides methods of detecting these variants as well as the design and preparation of detection reagents needed to accomplish this task. The invention specifically provides, for example, novel SNPs in genetic sequences involved in MI, isolated nucleic acid molecules (including DNA and RNA molecules) containing these SNPs, variant proteins encoded by nucleic acid molecules containing such SNPs, antibodies to the encoded variant proteins, computer-based and data storage systems containing the novel SNP information, methods of detecting these SNPs in a test sample, methods of identifying individuals who have an altered (i.e. increased or decreased) risk of developing CHD based on the presence or absence of one or more particular nucleotides (alleles) at one or more SNP sites disclosed herein or the detection of one or more encoded variant products (e.g., variant mRNA transcripts or variant proteins), methods of identifying individuals who are more or less likely to respond to a treatment (or more or less likely to experience undesirable side effects from a treatment), methods of screening for compounds useful in the treatment of a disorder associated with a variant gene/protein, compounds identified by these methods, methods of treating disorders mediated by a variant gene/protein, methods of using the novel SNPs of the present invention for human identification, etc.

[0039] In Tables 1 and 2, the present invention provides gene information, references to the identification of transcript sequences (SEQ ID NOS: 1-20), encoded amino acid sequences (SEQ ID NOS: 21-40), genomic sequences (SEQ ID NOS: 72-82), transcript-based context sequences (SEQ ID NOS: 41-71) and genomic-based context sequences (SEQ ID NOS: 83-187) that contain the SNPs of the present invention, and extensive SNP information that includes observed alleles, allele frequencies, populations/ethnic groups in which alleles have been observed, information about the type of SNP and corresponding functional effect, and, for cSNPs, information about the encoded polypeptide product. The actual transcript sequences (SEQ ID NOS: 1-20), amino acid sequences (SEQ ID NOS: 21-40), genomic sequences (SEQ ID NOS: 72-82), transcript-based SNP context sequences (SEQ ID NOS: 41-71), and genomic-based SNP context sequences (SEQ ID NOS: 83-187), together with primer sequences (SEQ ID NOS: 188-232) are provided in the Sequence Listing.

[0040] In one embodiment of the invention, applicants teach a method for identifying an individual who has an altered risk for developing CHD, comprising detecting a single nucleotide polymorphism (SNP) in any one of the nucleotide sequences of SEQ ID NOS: 1-20 and SEQ ID NOS: 41-71, SEQ ID NOS: 72-82, SEQ ID NOS: 83-187 in said individual's nucleic acids, wherein the SNP is as specified in Table 1 and Table 2, respectively, and the presence of the SNP is correlated with an altered risk for MI in said individual. In a specific embodiment of the present invention, SNPs that occur naturally in the human genome are provided as isolated nucleic acid molecules. These SNPs are associated with CHD, in particular MI, such that they can have a variety of uses in the diagnosis and/or treatment of CHD and related pathologies. In an alternative embodiment, a nucleic acid of the invention is an amplified polynucleotide, which is produced by amplification of a SNP-containing nucleic acid template. In another embodiment, the invention provides for a variant protein that is encoded by a nucleic acid molecule containing a SNP disclosed herein.

[0041] In yet another embodiment of the invention, a reagent for detecting a SNP in the context of its naturally-occurring flanking nucleotide sequences (which can be, e.g., either DNA or mRNA) is provided. In particular, such a reagent may be in the form of, for example, a hybridization probe or an amplification primer that is useful in the specific detection of a SNP of interest. In an alternative embodiment, a protein detection reagent is used to detect a variant protein that is encoded by a nucleic acid molecule containing a SNP disclosed herein. A preferred embodiment of a protein detection reagent is an antibody or an antigen-reactive antibody fragment.

[0042] Various embodiments of the invention also provide kits comprising SNP detection reagents, and methods for detecting the SNPs disclosed herein by employing detection reagents. In a specific embodiment, the present invention provides for a method of identifying an individual having an increased or decreased risk of developing MI by detecting the presence or absence of one or more SNP alleles disclosed herein. In another embodiment, a method for diagnosis of MI by detecting the presence or absence of one or more SNP alleles disclosed herein is provided.

[0043] The nucleic acid molecules of the invention can be inserted in an expression vector, such as to produce a variant protein in a host cell. Thus, the present invention also provides for a vector comprising a SNP-containing nucleic acid molecule, genetically-engineered host cells containing the vector, and methods for expressing a recombinant variant protein using such host cells. In another specific embodiment, the host cells, SNP-containing nucleic acid molecules, and/or variant proteins can be used as targets in a method for screening and identifying therapeutic agents or pharmaceutical compounds useful in the treatment of CHD, and in particular MI.

[0044] An aspect of this invention is a method for treating CHD, and in particular MI, in a human subject wherein said human subject harbors a SNP, gene, transcript, and/or encoded protein identified in Tables 1 and 2, which method comprises administering to said human subject a therapeutically or prophylactically effective amount of one or more agents counteracting the effects of the disease, such as by inhibiting (or stimulating) the activity of the gene, transcript, and/or encoded protein identified in Tables 1 and 2.

[0045] Another aspect of this invention is a method for identifying an agent useful in therapeutically or prophylactically treating CHD, and in particular MI, in a human subject wherein said human subject harbors a SNP, gene, transcript, and/or encoded protein identified in Tables 1 and 2, which method comprises contacting the gene, transcript, or encoded protein with a candidate agent under conditions suitable to allow formation of a binding complex between the gene, transcript, or encoded protein and the candidate agent and detecting the formation of the binding complex, wherein the presence of the complex identifies said agent.

[0046] Another aspect of this invention is a method for treating CHD such as MI in a human subject, which method comprises:

[0047] (i) determining that said human subject harbors a SNP, gene, transcript, and/or encoded protein identified in Tables 1 and 2, and

[0048] (ii) administering to said subject a therapeutically or prophylactically effective amount of one or more agents counteracting the effects of the disease such as statins.

[0049] Many other uses and advantages of the present invention will be apparent to those skilled in the art upon review of the detailed description of the preferred embodiments herein. Solely for clarity of discussion, the invention is described in the sections below by way of non-limiting examples.

[0050] Description of the Files Contained on the Cd-R Named CDR Duplicate Copy 1 and CDR Duplicate Copy 2

[0051] Each of the CD-R5 contains the following three files:

[0052] 1) File CD000005ORD_SEQLIST.txt provides the Sequence Listing. The Sequence Listing provides the transcript sequences (SEQ ID NOS: 1-20) and protein sequences (SEQ ID NOS: 21-40) as referred to in Table 1, and genomic sequences (SEQ ID NOS: 72-82) as referred to in Table 2, for each CHD-associated gene or genomic region (for intergenic SNPs) that contains one or more SNPs of the present invention. Also provided in the Sequence Listing are context sequences flanking each SNP, including both transcript-based context sequences as referred to in Table 1 (SEQ ID NOS: 41-71) and genomic-based context sequences as referred to in Table 2 (SEQ ID NOS: 83-187). In addition, the Sequence Listing provides the primer sequences from Table 3 and Table 4 (SEQ ID NOS: 188-232), which are oligonucleotides that have been synthesized and used in the laboratory to assay the SNPs disclosed in Tables 5-8 during the course of association studies to verify the association of these SNPs with coronary heart disease (CHD). The context sequences generally provide 100 bp upstream (5′) and 100 bp downstream (3′) of each SNP, with the SNP in the middle of the context sequence, for a total of 200 bp of context sequence surrounding each SNP. File CD000005ORD_SEQLIST.txt is 696 KB in size, and was created on Apr. 20, 2007. A computer readable format of the sequence listing is also submitted herein on a separate CDR labeled CRF. The information recorded in the CRF CDR is identical to the sequence listing as provided on the CDR Duplicate Copy 1 and Copy 2.

[0053] 2) File CD000005ORD_Table1.txt provides Table 1. File CD000005ORD_Table1.txt is 36 KB in size, and was created on Apr. 20, 2007.

[0054] 3) File CD000005ORD_Table2.txt provides Table 2. File CD000005ORD_Table2.txt is 74 KB in size, and was created on Apr. 20, 2007.

[0055] The material contained on the CD-R is hereby incorporated by reference pursuant to 37 CFR 1.77(b)(4).

[0056] Description of Table 1 and Table 2

LENGTHY TABLES
The patent application contains a lengthy table section. A copy of the table is available in electronic form from the USPTO web site (http://seqdata.uspto.gov/?pageRequest=docDetail&DocID=US20090312410A1). An electronic copy of the table will also be available from the USPTO upon request and payment of the fee set forth in 37 CFR 1.19(b)(3).

[0057] Table 1 and Table 2 (both provided on the CD-R) disclose the SNP and associated gene/transcript/protein information of the present invention. For each gene, Table 1 provides a header containing gene, transcript and protein information, followed by a transcript and protein sequence identifier (SEQ ID NO), and then SNP information regarding each SNP found in that gene/transcript including the transcript context sequence. For each gene in Table 2, a header is provided that contains gene and genomic information, followed by a genomic sequence identifier (SEQ ID NO) and then SNP information regarding each SNP found in that gene, including the genomic context sequence.

[0058] Note that SNP markers may be included in both Table 1 and Table 2; Table 1 presents the SNPs relative to their transcript sequences and encoded protein sequences, whereas Table 2 presents the SNPs relative to their genomic sequences. In some instances Table 2 may also include, after the last gene sequence, genomic sequences of one or more intergenic regions, as well as SNP context sequences and other SNP information for any SNPs that lie within these intergenic regions. Additionally, in either Table 1 or 2 a “Related Interrogated SNP” may be listed following a SNP which is determined to be in LD with that interrogated SNP according to the given Power value. SNPs can be readily cross-referenced between all Tables based on their Celera hCV (or, in some instances, hDV) identification numbers, and to the Sequence Listing based on their corresponding SEQ ID NOs.

[0059] The gene/transcript/protein information includes:
[0060] a gene number (1 through n, where n=the total number of genes in the Table),
[0061] a Celera hCG and UID internal identification numbers for the gene,
[0062] a Celera hCT and UID internal identification numbers for the transcript (Table 1 only),
[0063] a public Genbank accession number (e.g., RefSeq NM number) for the transcript (Table 1 only),
[0064] a Celera hCP and UID internal identification numbers for the protein encoded by the hCT transcript (Table 1 only),
[0065] a public Genbank accession number (e.g., RefSeq NP number) for the protein (Table 1 only),
[0066] an art-known gene symbol,
[0067] an art-known gene/protein name,
[0068] Celera genomic axis position (indicating start nucleotide position-stop nucleotide position),
[0069] the chromosome number of the chromosome on which the gene is located,
[0070] an OMIM (Online Mendelian Inheritance in Man; Johns Hopkins University/NCBI) public reference number for obtaining further information regarding the medical significance of each gene, and
[0071] alternative gene/protein name(s) and/or symbol(s) in the OMIM entry.

[0072] Note that, due to the presence of alternative splice forms, multiple transcript/protein entries may be provided for a single gene entry in Table 1; i.e., for a single Gene Number, multiple entries may be provided in series that differ in their transcript/protein information and sequences.

[0073] Following the gene/transcript/protein information is a transcript context sequence (Table 1), or a genomic context sequence (Table 2), for each SNP within that gene.

[0074] After the last gene sequence, Table 2 may include additional genomic sequences of intergenic regions (in such instances, these sequences are identified as “Intergenic region:” followed by a numerical identification number), as well as SNP context sequences and other SNP information for any SNPs that lie within each intergenic region (such SNPs are identified as “INTERGENIC” for SNP type).

[0075] Note that the transcript, protein, and transcript-based SNP context sequences are all provided in the Sequence Listing. The transcript-based SNP context sequences are provided in both Table 1 and also in the Sequence Listing. The genomic and genomic-based SNP context sequences are provided in the Sequence Listing. The genomic-based SNP context sequences are provided in both Table 2 and in the Sequence Listing. SEQ ID NOs are indicated in Table 1 for the transcript-based context sequences (SEQ ID NOS: 41-71); SEQ ID NOs are indicated in Table 2 for the genomic-based context sequences (SEQ ID NOS: 83-187).

[0076] The SNP information includes:
[0077] Context sequence (taken from the transcript sequence in Table 1, the genomic sequence in Table 2) with the SNP represented by its IUB code, including 100 bp upstream (5′) of the SNP position plus 100 bp downstream (3′) of the SNP position (the transcript-based SNP context sequences in Table 1 are provided in the Sequence Listing as SEQ ID NOS: 41-71; the genomic-based SNP context sequences in Table 2 are provided in the Sequence Listing as SEQ ID NOS: 83-187).
[0078] Celera hCV internal identification number for the SNP (in some instances, an “hDV” number is given instead of an “hCV” number).
[0079] The corresponding public identification number for the SNP, the rs number.
[0080] SNP position (position of the SNP within the given transcript sequence (Table 1) or within the given genomic sequence (Table 2)).
[0081] “Related Interrogated SNP” as the interrogated SNP with which the listed SNP is in LD at the given value of Power.
[0082] SNP source (may include any combination of one or more of the following five codes, depending on which internal sequencing projects and/or public databases the SNP has been observed in: “Applera”=SNP observed during the re-sequencing of genes and regulatory regions of 39 individuals, “Celera”=SNP observed during shotgun sequencing and assembly of the Celera human genome sequence, “Celera Diagnostics”=SNP observed during re-sequencing of nucleic acid samples from individuals who have a disease, “dbSNP”=SNP observed in the dbSNP public database, “HGBASE”=SNP observed in the HGBASE public database, “HGMD”=SNP observed in the Human Gene Mutation Database (HGMD) public database, “HapMap”=SNP observed in the International HapMap Project public database, “CSNP”=SNP observed in an internal Applied Biosystems (Foster City, Calif.) database of coding SNPS (cSNPs).

[0083] Note that multiple “Applera” source entries for a single SNP indicate that the same SNP was covered by multiple overlapping amplification products and the re-sequencing results (e.g., observed allele counts) from each of these amplification products is being provided.
[0084] Population/allele/allele count information in the format of [population1(first_allele,count|second_allele count)population2(first_allele,count|second_allele,count) total (first_allele,total count|second_allele,total count)]. The information in this field includes populations/ethnic groups in which particular SNP alleles have been observed (“cau”=Caucasian, “his”=Hispanic, “chn”=Chinese, and “afr”=African-American, “jpn”=Japanese, “ind”=Indian, “mex”=Mexican, “ain”=“American Indian, “cra”=Celera donor, “no_pop”=no population information available), identified SNP alleles, and observed allele counts (within each population group and total allele counts), where available [“−” in the allele field represents a deletion allele of an insertion/deletion (“indel”) polymorphism (in which case the corresponding insertion allele, which may be comprised of one or more nucleotides, is indicated in the allele field on the opposite side of the “|”); “-” in the count field indicates that allele count information is not available]. For certain SNPs from the public dbSNP database, population/ethnic information is indicated as follows (this population information is publicly available in dbSNP): “HISP1”=human individual DNA (anonymized samples) from 23 individuals of self-described HISPANIC heritage; “PAC1”=human individual DNA (anonymized samples) from 24 individuals of self-described PACIFIC RIM heritage; “CAUC1”=human individual DNA (anonymized samples) from 31 individuals of self-described CAUCASIAN heritage; “AFR1”=human individual DNA (anonymized samples) from 24 individuals of self-described AFRICAN/AFRICAN AMERICAN heritage; “P1”=human individual DNA (anonymized samples) from 102 individuals of self-described heritage; “PA130299515”; “SC_{—}12_A”=SANGER 12 DNAs of Asian origin from Corielle cell repositories, 6 of which are male and 6 female; “SC_{—}12_C”=SANGER 12 DNAs of Caucasian origin from Corielle cell repositories from the CEPH/UTAH library, six male and six female; “SC_{—}12_AA”=SANGER 12 DNAs of African-American origin from Corielle cell repositories 6 of which are male and 6 female; “SC_{—}95_C”=SANGER 95 DNAs of Caucasian origin from Corielle cell repositories from the CEPH/UTAH library; and “SC_{—}12_CA”=Caucasians—12 DNAs from Corielle cell repositories that are from the CEPH/UTAH library, six male and six female.

[0085] Note that for SNPs of “Applera” SNP source, genes/regulatory regions of 39 individuals (20 Caucasians and 19 African Americans) were re-sequenced and, since each SNP position is represented by two chromosomes in each individual (with the exception of SNPs on X and Y chromosomes in males, for which each SNP position is represented by a single chromosome), up to 78 chromosomes were genotyped for each SNP position. Thus, the sum of the African-American (“afr”) allele counts is up to 38, the sum of the Caucasian allele counts (“cau”) is up to 40, and the total sum of all allele counts is up to 78.

[0086] Note that semicolons separate population/allele/count information corresponding to each indicated SNP source; i.e., if four SNP sources are indicated, such as “Celera,” “dbSNP,” “HGBASE,” and “HGMD,” then population/allele/count information is provided in four groups which are separated by semicolons and listed in the same order as the listing of SNP sources, with each population/allele/count information group corresponding to the respective SNP source based on order; thus, in this example, the first population/allele/count information group would correspond to the first listed SNP source (Celera) and the third population/allele/count information group separated by semicolons would correspond to the third listed SNP source (HGBASE); if population/allele/count information is not available for any particular SNP source, then a pair of semicolons is still inserted as a place-holder in order to maintain correspondence between the list of SNP sources and the corresponding listing of population/allele/count information.
[0087] SNP type (e.g., location within gene/transcript and/or predicted functional effect) [“MIS-SENSE MUTATION”=SNP causes a change in the encoded amino acid (i.e., a non-synonymous coding SNP); “SILENT MUTATION”=SNP does not cause a change in the encoded amino acid (i.e., a synonymous coding SNP); “STOP CODON MUTATION”=SNP is located in a stop codon; “NONSENSE MUTATION”=SNP creates or destroys a stop codon; “UTR 5”=SNP is located in a 5′ UTR of a transcript; “UTR 3”=SNP is located in a 3′ UTR of a transcript; “PUTATIVE UTR 5”=SNP is located in a putative 5′ UTR; “PUTATIVE UTR 3”=SNP is located in a putative 3′ UTR; “DONOR SPLICE SITE”=SNP is located in a donor splice site (5′ intron boundary); “ACCEPTOR SPLICE SITE”=SNP is located in an acceptor splice site (3′ intron boundary); “CODING REGION”=SNP is located in a protein-coding region of the transcript; “EXON”=SNP is located in an exon; “INTRON”=SNP is located in an intron; “hmCS”=SNP is located in a human-mouse conserved segment; “TFBS”=SNP is located in a transcription factor binding site; “UNKNOWN”=SNP type is not defined; “INTERGENIC”=SNP is intergenic, i.e., outside of any gene boundary].
[0088] Protein coding information (Table 1 only), where relevant, in the format of [protein SEQ ID NO, amino acid position, (amino acid-1, codon1) (amino acid-2, codon2)]. The information in this field includes SEQ ID NO of the encoded protein sequence, position of the amino acid residue within the protein identified by the SEQ ID NO that is encoded by the codon containing the SNP, amino acids (represented by one-letter amino acid codes) that are encoded by the alternative SNP alleles (in the case of stop codons, “X” is used for the one-letter amino acid code), and alternative codons containing the alternative SNP nucleotides which encode the amino acid residues (thus, for example, for missense mutation-type SNPs, at least two different amino acids and at least two different codons are generally indicated; for silent mutation-type SNPs, one amino acid and at least two different codons are generally indicated, etc.). In instances where the SNP is located outside of a protein-coding region (e.g., in a UTR region), “None” is indicated following the protein SEQ ID NO.

[0089] Description of Table 3

[0090] Table 3 provides sequences of allele-specific oligonucleotides that have been synthesized and used in the laboratory to assay the SNPs disclosed in Tables 5-8 during the course of association studies to verify the association of these SNPs with coronary heart disease (CHD). The experiments that were conducted using these primers are explained in detail in Examples 1 and 2, below.

[0091] Table 3 provides the following:
[0092] The column labeled “SNP Marker Identifier” lists the Celera identifier hCV number for each SNP marker.
[0093] The column labeled “SNP” designates the two alternative alleles at the SNP site identified by the hCV identification number that are targeted by the allele-specific oligonucleotides.
[0094] Allele-specific oligonucleotides with their respective SEQ ID numbers are shown in the next two columns, “Primer 1” and “Primer 2.” These two primers were used in conjunction with a common primer (Table 4) in each PCR assay to genotype DNA samples for each SNP marker. Note that alleles may be presented in Table 3 based on a different orientation (i.e., the reverse complement) relative to how the same alleles are presented in Tables 1 and 2.

[0095] All sequences are given in the 5′ to 3′ direction.

[0096] Description of Table 4

[0097] Table 4 provides sequences of oligonucleotides that have been synthesized and used in the laboratory to assay the SNPs disclosed in Tables 5-8 during the course of association studies to verify the association of these SNPs with coronary heart disease (CHD). The experiments that were conducted using these primers are explained in detail in Examples 1 and 2, below.

[0098] Table 4 provides the following:
[0099] The column labeled “SNP Marker Identifier” lists the Celera identifier hCV number for each SNP marker.
[0100] Common oligonucleotides with their respective SEQ ID numbers are shown in the column, “Common Primer.” Each common primer was used in conjunction with the two allele-specific primers of Table 3 to genotype DNA samples for each SNP marker.

[0101] Description of Table 5

[0102] Table 5 provides results of statistical analyses for certain SNPs disclosed in Tables 1 and 2 (SNPs can be cross-referenced between tables based on their hCV identification numbers), and the association of these SNPs with CHD. The experiment that provided this data is explained in detail in Example 1, below. The statistical results provided in Table 5 show that the association of these SNPs with early-onset MI is supported by P values<0.05 in allelic association tests from two separate studies.

[0103] In Table 5, the column labeled “SNP Marker Identifier” presents each SNP as identified by its unique Celera hCV identification number. The column “Gene Symbol” presents the standard symbol for the gene containing the SNP; i.e., the symbol approved by the Human Genome Organization (HUGO) Gene Nomenclature Committee. The column labeled “Risk Allele” presents the variant nucleotide for each of the identified SNPs, which is associated with an increased risk for early-onset MI. (The risk allele may be presented in Table 5 as the reverse complement relative to its orientation as presented in Table 1 and/or Table 2.) “Study” indicates whether the samples were from Study 1 or 2. Samples in Study 1 were obtained from patients at the Cleveland Clinic Foundation Heart Center (CCF); samples in Study 2, from the University of California at San Francisco (UCSF). The column labeled “value” indicates the results of the two-sided Fisher Exact test (allelic) to determine whether a certain allele of a SNP is associated with early-onset MI. The column labeled “OR” (odds ratio) indicates an approximation of the relative risk of association with early-onset MI for an individual with that risk allele. An OR of <1.0 indicates that the allele is protective for early-onset MI, and an OR>1.0 indicates the allele increases the risk of early-onset MI. Note that SNPs can be cross-referenced between the tables herein based on their hCV identification numbers.

[0104] Description of Table 6

[0105] Table 6 provides the results of statistical analyses for certain SNPs disclosed in Tables 1 and 2; namely, the genotypic association of SNP alleles with a risk for early-onset MI based on case-control studies. The experiment that provided this data is explained in detail in Example 1, below. Note that SNPs can be cross-referenced between tables based on their hCV identification numbers. The statistical results provided in Table 6 show that the association of these SNPs with early-onset MI is supported by P values<0.1 in genotypic association tests. The data presented were obtained from individually genotyped samples in Study 3 (UCSF sample set).

[0106] In Table 6, the column labeled “Gene Symbol” presents the standard symbol for the gene containing the SNP; i.e., the symbol approved by the Human Genome Organization (HUGO) Gene Nomenclature Committee. The column labeled “SNP Marker Identifier” presents each SNP as identified by its unique Celera identifier, the hCV number. The column labeled “Genotype” presents the three genotypes analyzed: homozygous for the non-risk allele, heterozygous, and homozygous for the risk allele. Each SNP's genotype may be presented in Tables 1 and/or 2 as the complement of the genotype presented in Table 6; e.g., “GG” may be presented as its complement, “CC.” The column labeled “value” indicates the results of the one-sided Wald test in a logistic regression model for genotypic association, to determine whether a genotype is associated with early-onset MI. The column labeled “OR” (odds ratio) shows an approximation of the relative early-onset MI risk for individuals with that genotype, based on the observed frequencies of genotypes in cases vs. controls. An OR less than one would indicate a genotype is protective for early-onset MI, and an OR greater than one indicates the genotype is associated with an increased risk of early-onset MI. Also shown is the 90% confidence interval calculated around each OR presented, in column “CI (90%).” For SNPs in all genes but HNRPUL1, the odds ratios provided for the given genotype were derived by comparing cases and controls of that genotype with individuals homozygous for the non-risk allele. In HNRPUL1, because the frequency of non-risk homozygotes was so low, the OR for the homozygous risk genotype was derived by comparing individuals of this genotype with heterozygous individuals only.

[0107] Description of Table 7

[0108] Table 7 provides the results of statistical analyses for certain SNPs disclosed in Tables 1 and 2; namely, the association of SNPs with a risk for early-onset MI based on case-control studies. For each SNP a model of association with early-onset MI is indicated, based on the most significant P values observed experimentally. The models of association are allelic, which closely approximates an additive model, or genotypic (dominant/recessive). The experiment that provided this data is explained in detail in the Example 1, below. The statistical results in Table 7 show that the association of these SNPs with early-onset MI is supported by P values<0.1 for the given model. The data presented were obtained from individually genotyped samples from Study 3 (UCSF). All P values for association with early-onset MI were determined using the one-sided Wald test in a logistic regression model.

[0109] The column labeled “Model” indicates the genetic model under which the OR and P value for association was calculated. Under a genotypic analysis (recessive or dominant), the model is recessive when only individuals with two copies of the risk allele are at risk for early-onset MI. When individuals with one or two copies of the risk allele are at risk, the model is dominant. When individuals with two risk alleles have a risk value that is approximately squared that of individuals with one risk allele, the model is additive/allelic. The column labeled “value” indicates the results of either the one-sided asymptotic chi-square test for genotypic association (recessive or dominant), or a logistic regression (Wald test) to determine if the qualitative phenotype is a function of the SNP genotype by allelic association. The column labeled “OR” (odds ratio) indicates an approximation of the relative risk for an individual for the defined endpoint associated with the SNP. An OR of less than one indicates that the allele is protective for MI, and an OR greater than one indicates the allele increases the risk of MI. Also shown are the confidence intervals around each OR, “CI (90%).” Dominant/recessive model associations were calculated by comparing cases and controls of all heterozygous and homozygous risk allele individuals, with homozygous non-risk allele individuals. The column labeled “FDR” indicates the estimated false discovery rate for each SNP. The mode of calculating FDR is described in Example 1, below.

[0110] Description of Table 8

[0111] Table 8 provides the results of statistical analyses for certain SNPs disclosed in Tables 1 and 2; namely, the association of SNP genotypes with a risk for early-onset MI based on case-control studies.

[0112] The statistical results provided in Table 8 show that the association of these SNPs with MI is supported by P values≦0.10 in allelic association tests. The data presented were obtained from individually genotyped samples from Study 2 (UCSF). The column “Gene Symbol” indicates the gene region from which the investigated markers were obtained. P values for allelic association with early-onset MI were determined using the two-sided Wald test in a logistic regression model. In each case the OR was calculated using a reference allele that resulted in an OR>1.0.

[0113] Description of Table 9

[0114] Table 9 provides a list of the sample LD SNPs that are related to and derived from an interrogated SNP. These LD SNPs are provided as an example of the groups of SNPs which can also serve as markers for disease association based on their being in LD with the interrogated SNP. The criteria and process of selecting such LD SNPs, including the calculation of the r² value and the r² threshold value, are described in Example 3, below.

[0115] In Table 9, the column labeled “Interrogated SNP” presents each marker as identified by its unique identifier, the hCV number. The column labeled “Interrogated rs” presents the publicly known identifier rs number for the corresponding hCV number. The column labeled “LD SNP” presents the hCV numbers of the LD SNPs that are derived from their corresponding interrogated SNPs. The column labeled “LD SNP rs” presents the publicly known rs number for the corresponding hCV number. The column labeled “Power” presents the level of power where the r² threshold is set. For example, when power is set at 51%, the threshold r² value calculated therefrom is the minimum r² that an LD SNP must have in reference to an interrogated SNP, in order for the LD SNP to be classified as a marker capable of being associated with a disease phenotype at greater than 51% probability. The column labeled “Threshold r_{T}²” presents the minimum value of r² that an LD SNP must meet in reference to an interrogated SNP in order to qualify as an LD SNP. The column labeled “r²” presents the actual r² value of the LD SNP in reference to the interrogated SNP to which it is related.

### DETAILED DESCRIPTION OF THE INVENTION

[0116] The present invention provides SNPs associated with CHD, in particular MI, nucleic acid molecules containing SNPs, methods and reagents for the detection of the SNPs disclosed herein, uses of these SNPs for the development of detection reagents, and assays or kits that utilize such reagents. The MI-associated SNPs disclosed herein are useful for diagnosing, screening for, and evaluating predisposition to MI and related pathologies in humans. Furthermore, such SNPs and their encoded products are useful targets for the development of therapeutic agents.

[0117] A large number of SNPs have been identified from re-sequencing DNA from 39 individuals, and they are indicated as “Applera” SNP source in Tables 1-2. Their allele frequencies observed in each of the Caucasian and African-American ethnic groups are provided. Additional SNPs included herein were previously identified during “shotgun” sequencing and assembly of the human genome, and they are indicated as “Celera” SNP source in Tables 1 and 2. Furthermore, the information provided in Tables 1 and 2, particularly the allele frequency information obtained from 39 individuals and the identification of the precise position of each SNP within each gene/transcript, allows haplotypes (i.e., groups of SNPs that are co-inherited) to be readily inferred. The present invention encompasses SNP haplotypes, as well as individual SNPs.

[0118] Thus, the present invention provides individual SNPs associated with CHD, in particular MI, as well as combinations of SNPs and haplotypes in genetic regions associated with CHD, in particular MI, polymorphic/variant transcript sequences (SEQ ID NOS: 1-20) and genomic sequences (SEQ ID NOS: 72-82) containing SNPs, encoded amino acid sequences (SEQ ID NOS: 21-40), and both transcript-based SNP context sequences (SEQ ID NOS: 41-71) and genomic-based SNP context sequences (SEQ ID NOS: 83-187) (transcript sequences, protein sequences, and transcript-based SNP context sequences are provided in Table 1 and the Sequence Listing; genomic sequences and genomic-based SNP context sequences are provided in Table 2 and the Sequence Listing), methods of detecting these polymorphisms in a test sample, methods of determining the risk of an individual of having or developing MI, methods of screening for compounds useful for treating disorders associated with a variant gene/protein such as MI, compounds identified by these screening methods, methods of using the disclosed SNPs to select a treatment strategy, methods of treating a disorder associated with a variant gene/protein (i.e., therapeutic methods), methods of determining if an individual is likely to respond to a specific treatment such as statins and methods of using the SNPs of the present invention for human identification.

[0119] The present invention provides novel SNPs associated with MI, as well as SNPs that were previously known in the art, but were not previously known to be associated with MI. Accordingly, the present invention provides novel compositions and methods based on the novel SNPs disclosed herein, and also provides novel methods of using the known, but previously unassociated, SNPs in methods relating to MI (e.g., for diagnosing MI). In Tables 1 and 2, known SNPs are identified based on the public database in which they have been observed, which is indicated as one or more of the following SNP types: “dbSNP”=SNP observed in dbSNP, “HGBASE”=SNP observed in HGBASE, and “HGMD”=SNP observed in the Human Gene Mutation Database (HGMD). Novel SNPs for which the SNP source is only “Applera” and none other, i.e., those that have not been observed in any public databases and which were also not observed during shotgun sequencing and assembly of the Celera human genome sequence (i.e., “Celera” SNP source), are also noted in the tables.

[0120] Particular SNP alleles of the present invention can be associated with either an increased risk of having or developing MI, or a decreased risk of having or developing MI. SNP alleles that are associated with a decreased risk of having or developing MI may be referred to as “protective” alleles, and SNP alleles that are associated with an increased risk of having or developing MI may be referred to as “susceptibility” alleles, “risk” alleles, or “risk factors.” Thus, whereas certain SNPs (or their encoded products) can be assayed to determine whether an individual possesses a SNP allele that is indicative of an increased risk of having or developing MI (i.e., a susceptibility allele), other SNPs (or their encoded products) can be assayed to determine whether an individual possesses a SNP allele that is indicative of a decreased risk of having or developing MI (i.e., a protective allele). Similarly, particular SNP alleles of the present invention can be associated with either an increased or decreased likelihood of responding to a particular treatment or therapeutic compound, or an increased or decreased likelihood of experiencing toxic effects from a particular treatment or therapeutic compound. The term “altered” may be used herein to encompass either of these two possibilities (e.g., an increased or a decreased risk/likelihood).

[0121] Those skilled in the art will readily recognize that nucleic acid molecules may be double-stranded molecules and that reference to a particular site on one strand refers, as well, to the corresponding site on a complementary strand. In defining a SNP position, SNP allele, or nucleotide sequence, reference to an adenine, a thymine (uridine), a cytosine, or a guanine at a particular site on one strand of a nucleic acid molecule also defines the thymine (uridine), adenine, guanine, or cytosine (respectively) at the corresponding site on a complementary strand of the nucleic acid molecule. Thus, reference may be made to either strand in order to refer to a particular SNP position, SNP allele, or nucleotide sequence. Probes and primers, may be designed to hybridize to either strand and SNP genotyping methods disclosed herein may generally target either strand. Throughout the specification, in identifying a SNP position, reference is generally made to the protein-encoding strand, only for the purpose of convenience.

[0122] References to variant peptides, polypeptides, or proteins of the present invention include peptides, polypeptides, proteins, or fragments thereof, that contain at least one amino acid residue that differs from the corresponding amino acid sequence of the art-known peptide/polypeptide/protein (the art-known protein may be interchangeably referred to as the “wild-type,” “reference,” or “normal” protein). Such variant peptides/polypeptides/proteins can result from a codon change caused by a nonsynonymous nucleotide substitution at a protein-coding SNP position (i.e., a missense mutation) disclosed by the present invention. Variant peptides/polypeptides/proteins of the present invention can also result from a nonsense mutation (i.e., a SNP that creates a premature stop codon, a SNP that generates a read-through mutation by abolishing a stop codon), or due to any SNP disclosed by the present invention that otherwise alters the structure, function, activity, or expression of a protein, such as a SNP in a regulatory region (e.g. a promoter or enhancer) or a SNP that leads to alternative or defective splicing, such as a SNP in an intron or a SNP at an exon/intron boundary. As used herein, the terms “polypeptide,” “peptide,” and “protein” are used interchangeably.

[0123] Isolated Nucleic Acid Molecules and SNP Detection Reagents & Kits

[0124] Tables 1 and 2 provide a variety of information about each SNP of the present invention that is associated with CHD, and in particular MI, including the transcript sequences (SEQ ID NOS: 1-20), genomic sequences (SEQ ID NOS: 72-82), and protein sequences (SEQ ID NOS: 21-40) of the encoded gene products (with the SNPs indicated by IUB codes in the nucleic acid sequences). In addition, Tables 1 and 2 include SNP context sequences, which generally include 100 nucleotide upstream (5′) plus 100 nucleotides downstream (3′) of each SNP position (SEQ ID NOS: 41-71 correspond to transcript-based SNP context sequences disclosed in Table 1, and SEQ ID NOS: 83-187 correspond to genomic-based context sequences disclosed in Table 2), the alternative nucleotides (alleles) at each SNP position, and additional information about the variant where relevant, such as SNP type (coding, missense, splice site, UTR, etc.), human populations in which the SNP was observed, observed allele frequencies, information about the encoded protein, etc.

[0125] Isolated Nucleic Acid Molecules

[0126] The present invention provides isolated nucleic acid molecules that contain one or more SNPs disclosed Table 1 and/or Table 2. Isolated nucleic acid molecules containing one or more SNPs disclosed in at least one of Tables 1 and 2 may be interchangeably referred to throughout the present text as “SNP-containing nucleic acid molecules.” Isolated nucleic acid molecules may optionally encode a full-length variant protein or fragment thereof. The isolated nucleic acid molecules of the present invention also include probes and primers (which are described in greater detail below in the section entitled “SNP Detection Reagents”), which may be used for assaying the disclosed SNPs, and isolated full-length genes, transcripts, cDNA molecules, and fragments thereof, which may be used for such purposes as expressing an encoded protein.

[0127] As used herein, an “isolated nucleic acid molecule” generally is one that contains a SNP of the present invention or one that hybridizes to such molecule such as a nucleic acid with a complementary sequence, and is separated from most other nucleic acids present in the natural source of the nucleic acid molecule. Moreover, an “isolated” nucleic acid molecule, such as a cDNA molecule containing a SNP of the present invention, can be substantially free of other cellular material, or culture medium when produced by recombinant techniques, or chemical precursors or other chemicals when chemically synthesized. A nucleic acid molecule can be fused to other coding or regulatory sequences and still be considered “isolated.” Nucleic acid molecules present in non-human transgenic animals, which do not naturally occur in the animal, are also considered “isolated.” For example, recombinant DNA molecules contained in a vector are considered “isolated.” Further examples of “isolated” DNA molecules include recombinant DNA molecules maintained in heterologous host cells, and purified (partially or substantially) DNA molecules in solution. Isolated RNA molecules include in vivo or in vitro RNA transcripts of the isolated SNP-containing DNA molecules of the present invention. Isolated nucleic acid molecules according to the present invention further include such molecules produced synthetically.

[0128] Generally, an isolated SNP-containing nucleic acid molecule comprises one or more SNP positions disclosed by the present invention with flanking nucleotide sequences on either side of the SNP positions. A flanking sequence can include nucleotide residues that are naturally associated with the SNP site and/or heterologous nucleotide sequences. Preferably, the flanking sequence is up to about 500, 300, 100, 60, 50, 30, 25, 20, 15, 10, 8, or 4 nucleotides (or any other length in-between) on either side of a SNP position, or as long as the full-length gene or entire protein-coding sequence (or any portion thereof such as an exon), especially if the SNP-containing nucleic acid molecule is to be used to produce a protein or protein fragment.

[0129] For full-length genes and entire protein-coding sequences, a SNP flanking sequence can be, for example, up to about 5 KB, 4 KB, 3 KB, 2 KB, 1 KB on either side of the SNP. Furthermore, in such instances the isolated nucleic acid molecule comprises exonic sequences (including protein-coding and/or non-coding exonic sequences), but may also include intronic sequences. Thus, any protein coding sequence may be either contiguous or separated by introns. The important point is that the nucleic acid is isolated from remote and unimportant flanking sequences and is of appropriate length such that it can be subjected to the specific manipulations or uses described herein such as recombinant protein expression, preparation of probes and primers for assaying the SNP position, and other uses specific to the SNP-containing nucleic acid sequences.

[0130] An isolated SNP-containing nucleic acid molecule can comprise, for example, a full-length gene or transcript, such as a gene isolated from genomic DNA (e.g., by cloning or PCR amplification), a cDNA molecule, or an mRNA transcript molecule. Polymorphic transcript sequences are referred to in Table 1 and provided in the Sequence Listing (SEQ ID NOS: 1-20), and polymorphic genomic sequences are referred to in Table 2 and provided in the Sequence Listing (SEQ ID NOS: 72-82). Furthermore, fragments of such full-length genes and transcripts that contain one or more SNPs disclosed herein are also encompassed by the present invention, and such fragments may be used, for example, to express any part of a protein, such as a particular functional domain or an antigenic epitope.

[0131] Thus, the present invention also encompasses fragments of the nucleic acid sequences as disclosed in Tables 1 and 2 (transcript sequences are referred to in Table 1 as SEQ ID NOS: 1-20, genomic sequences are referred to in Table 2 as SEQ ID NOS: 72-82, transcript-based SNP context sequences are referred to in Table 1 as SEQ ID NOS: 41-71, and genomic-based SNP context sequences are referred to in Table 2 as SEQ ID NOS: 83-187) and their complements. The actual sequences referred to in the tables are provided in the Sequence Listing. A fragment typically comprises a contiguous nucleotide sequence at least about 8 or more nucleotides, more preferably at least about 12 or more nucleotides, and even more preferably at least about 16 or more nucleotides. Furthermore, a fragment could comprise at least about 18, 20, 22, 25, 30, 40, 50, 60, 80, 100, 150, 200, 250 or 500 nucleotides in length (or any other number in between). The length of the fragment will be based on its intended use. For example, the fragment can encode epitope-bearing regions of a variant peptide or regions of a variant peptide that differ from the normal/wild-type protein, or can be useful as a polynucleotide probe or primer. Such fragments can be isolated using the nucleotide sequences provided in Table 1 and/or Table 2 for the synthesis of a polynucleotide probe. A labeled probe can then be used, for example, to screen a cDNA library, genomic DNA library, or mRNA to isolate nucleic acid corresponding to the coding region. Further, primers can be used in amplification reactions, such as for purposes of assaying one or more SNPs sites or for cloning specific regions of a gene.

[0132] An isolated nucleic acid molecule of the present invention further encompasses a SNP-containing polynucleotide that is the product of any one of a variety of nucleic acid amplification methods, which are used to increase the copy numbers of a polynucleotide of interest in a nucleic acid sample. Such amplification methods are well known in the art, and they include but are not limited to, polymerase chain reaction (PCR) (U.S. Pat. Nos. 4,683,195 and 4,683,202; PCR Technology: Principles and Applications for DNA Amplification, ed. H. A. Erlich, Freeman Press, NY, N.Y. (1992)), ligase chain reaction (LCR) (Wu and Wallace, Genomics 4:560 (1989); Landegren et al., Science 241:1077 (1988)), strand displacement amplification (SDA) (U.S. Pat. Nos. 5,270,184 and 5,422,252), transcription-mediated amplification (TMA) (U.S. Pat. No. 5,399,491), linked linear amplification (LLA) (U.S. Pat. No. 6,027,923) and the like, and isothermal amplification methods such as nucleic acid sequence based amplification (NASBA) and self-sustained sequence replication (Guatelli et al., Proc Natl Acad Sci USA 87:1874 (1990)). Based on such methodologies, a person skilled in the art can readily design primers in any suitable regions 5′ and 3′ to a SNP disclosed herein. Such primers may be used to amplify DNA of any length so long that it contains the SNP of interest in its sequence.

[0133] As used herein, an “amplified polynucleotide” of the invention is a SNP-containing nucleic acid molecule whose amount has been increased at least two fold by any nucleic acid amplification method performed in vitro as compared to its starting amount in a test sample. In other preferred embodiments, an amplified polynucleotide is the result of at least ten fold, fifty fold, one hundred fold, one thousand fold, or even ten thousand fold increase as compared to its starting amount in a test sample. In a typical PCR amplification, a polynucleotide of interest is often amplified at least fifty thousand fold in amount over the unamplified genomic DNA, but the precise amount of amplification needed for an assay depends on the sensitivity of the subsequent detection method used.

[0134] Generally, an amplified polynucleotide is at least about 16 nucleotides in length. More typically, an amplified polynucleotide is at least about 20 nucleotides in length. In a preferred embodiment of the invention, an amplified polynucleotide is at least about 30 nucleotides in length. In a more preferred embodiment of the invention, an amplified polynucleotide is at least about 32, 40, 45, 50, or 60 nucleotides in length. In yet another preferred embodiment of the invention, an amplified polynucleotide is at least about 100, 200, 300, 400, or 500 nucleotides in length. While the total length of an amplified polynucleotide of the invention can be as long as an exon, an intron or the entire gene where the SNP of interest resides, an amplified product is typically up to about 1,000 nucleotides in length (although certain amplification methods may generate amplified products greater than 1000 nucleotides in length). More preferably, an amplified polynucleotide is not greater than about 600-700 nucleotides in length. It is understood that irrespective of the length of an amplified polynucleotide, a SNP of interest may be located anywhere along its sequence.

[0135] In a specific embodiment of the invention, the amplified product is at least about 201 nucleotides in length, comprises one of the transcript-based context sequences or the genomic-based context sequences shown in Tables 1 and 2. Such a product may have additional sequences on its 5′ end or 3′ end or both. In another embodiment, the amplified product is about 101 nucleotides in length, and it contains a SNP disclosed herein. Preferably, the SNP is located at the middle of the amplified product (e.g., at position 101 in an amplified product that is 201 nucleotides in length, or at position 51 in an amplified product that is 101 nucleotides in length), or within 1, 2, 3, 4, 5, 6, 7, 8, 9, 10, 12, 15, or 20 nucleotides from the middle of the amplified product. However, as indicated above, the SNP of interest may be located anywhere along the length of the amplified product.

[0136] The present invention provides isolated nucleic acid molecules that comprise, consist of, or consist essentially of one or more polynucleotide sequences that contain one or more SNPs disclosed herein, complements thereof, and SNP-containing fragments thereof.

[0137] Accordingly, the present invention provides nucleic acid molecules that consist of any of the nucleotide sequences shown in Table 1 and/or Table 2 (transcript sequences are referred to in Table 1 as SEQ ID NOS: 1-20, genomic sequences are referred to in Table 2 as SEQ ID NOS: 72-82, transcript-based SNP context sequences are referred to in Table 1 as SEQ ID NOS: 41-71, and genomic-based SNP context sequences are referred to in Table 2 as SEQ ID NOS: 83-187), or any nucleic acid molecule that encodes any of the variant proteins referred to in Table 1 (SEQ ID NOS: 21-40). The actual sequences referred to in the tables are provided in the Sequence Listing. A nucleic acid molecule consists of a nucleotide sequence when the nucleotide sequence is the complete nucleotide sequence of the nucleic acid molecule.

[0138] The present invention further provides nucleic acid molecules that consist essentially of any of the nucleotide sequences referred to in Table 1 and/or Table 2 (transcript sequences are referred to in Table 1 as SEQ ID NOS: 1-20, genomic sequences are referred to in Table 2 as SEQ ID NOS: 72-82, transcript-based SNP context sequences are referred to in Table 1 as SEQ ID NOS: 41-71, and genomic-based SNP context sequences are referred to in Table 2 as SEQ ID NOS: 83-187), or any nucleic acid molecule that encodes any of the variant proteins referred to in Table 1 (SEQ ID NOS: 21-40). The actual sequences referred to in the tables are provided in the Sequence Listing. A nucleic acid molecule consists essentially of a nucleotide sequence when such a nucleotide sequence is present with only a few additional nucleotide residues in the final nucleic acid molecule.

[0139] The present invention further provides nucleic acid molecules that comprise any of the nucleotide sequences shown in Table 1 and/or Table 2 or a SNP-containing fragment thereof (transcript sequences are referred to in Table 1 as SEQ ID NOS: 1-20, genomic sequences are referred to in Table 2 as SEQ ID NOS: 72-82, transcript-based SNP context sequences are referred to in Table 1 as SEQ ID NOS: 41-71, and genomic-based SNP context sequences are referred to in Table 2 as SEQ ID NOS: 83-187), or any nucleic acid molecule that encodes any of the variant proteins provided in Table 1 (SEQ ID NOS: 21-40). The actual sequences referred to in the tables are provided in the Sequence Listing. A nucleic acid molecule comprises a nucleotide sequence when the nucleotide sequence is at least part of the final nucleotide sequence of the nucleic acid molecule. In such a fashion, the nucleic acid molecule can be only the nucleotide sequence or have additional nucleotide residues, such as residues that are naturally associated with it or heterologous nucleotide sequences. Such a nucleic acid molecule can have one to a few additional nucleotides or can comprise many more additional nucleotides. A brief description of how various types of these nucleic acid molecules can be readily made and isolated is provided below, and such techniques are well known to those of ordinary skill in the art. Sambrook and Russell, Molecular Cloning: A Laboratory Manual, Cold Spring Harbor Press, N.Y. (2000).

[0140] The isolated nucleic acid molecules can encode mature proteins plus additional amino or carboxyl-terminal amino acids or both, or amino acids interior to the mature peptide (when the mature form has more than one peptide chain, for instance). Such sequences may play a role in processing of a protein from precursor to a mature form, facilitate protein trafficking, prolong or shorten protein half-life, or facilitate manipulation of a protein for assay or production. As generally is the case in situ, the additional amino acids may be processed away from the mature protein by cellular enzymes.

[0141] Thus, the isolated nucleic acid molecules include, but are not limited to, nucleic acid molecules having a sequence encoding a peptide alone, a sequence encoding a mature peptide and additional coding sequences such as a leader or secretory sequence (e.g., a pre-pro or pro-protein sequence), a sequence encoding a mature peptide with or without additional coding sequences, plus additional non-coding sequences, for example introns and non-coding 5′ and 3′ sequences such as transcribed but untranslated sequences that play a role in, for example, transcription, mRNA processing (including splicing and polyadenylation signals), ribosome binding, and/or stability of mRNA. In addition, the nucleic acid molecules may be fused to heterologous marker sequences encoding, for example, a peptide that facilitates purification.

[0142] Isolated nucleic acid molecules can be in the form of RNA, such as mRNA, or in the form DNA, including cDNA and genomic DNA, which may be obtained, for example, by molecular cloning or produced by chemical synthetic techniques or by a combination thereof. Sambrook and Russell, Molecular Cloning: A Laboratory Manual, Cold Spring Harbor Press, N.Y. (2000). Furthermore, isolated nucleic acid molecules, particularly SNP detection reagents such as probes and primers, can also be partially or completely in the form of one or more types of nucleic acid analogs, such as peptide nucleic acid (PNA). U.S. Pat. Nos. 5,539,082; 5,527,675; 5,623,049; and 5,714,331. The nucleic acid, especially DNA, can be double-stranded or single-stranded. Single-stranded nucleic acid can be the coding strand (sense strand) or the complementary non-coding strand (anti-sense strand). DNA, RNA, or PNA segments can be assembled, for example, from fragments of the human genome (in the case of DNA or RNA) or single nucleotides, short oligonucleotide linkers, or from a series of oligonucleotides, to provide a synthetic nucleic acid molecule. Nucleic acid molecules can be readily synthesized using the sequences provided herein as a reference; oligonucleotide and PNA oligomer synthesis techniques are well known in the art. See, e.g., Corey, “Peptide nucleic acids: expanding the scope of nucleic acid recognition,” Trends Biotechnol 15(6):224-9 (June 1997), and Hyrup et al., “Peptide nucleic acids (PNA): synthesis, properties and potential applications,” Bioorg Med Chem 4(1):5-23) (January 1996). Furthermore, large-scale automated oligonucleotide/PNA synthesis (including synthesis on an array or bead surface or other solid support) can readily be accomplished using commercially available nucleic acid synthesizers, such as the Applied Biosystems (Foster City, Calif.) 3900 High-Throughput DNA Synthesizer or Expedite 8909 Nucleic Acid Synthesis System, and the sequence information provided herein.

[0143] The present invention encompasses nucleic acid analogs that contain modified, synthetic, or non-naturally occurring nucleotides or structural elements or other alternative/modified nucleic acid chemistries known in the art. Such nucleic acid analogs are useful, for example, as detection reagents (e.g., primers/probes) for detecting one or more SNPs identified in Table 1 and/or Table 2. Furthermore, kits/systems (such as beads, arrays, etc.) that include these analogs are also encompassed by the present invention. For example, PNA oligomers that are based on the polymorphic sequences of the present invention are specifically contemplated. PNA oligomers are analogs of DNA in which the phosphate backbone is replaced with a peptide-like backbone. Lagriffoul et al., Bioorganic & Medicinal Chemistry Letters 4:1081-1082 (1994); Petersen et al., Bioorganic & Medicinal Chemistry Letters 6:793-796 (1996); Kumar et al., Organic Letters 3(9):1269-1272 (2001); WO 96/04000. PNA hybridizes to complementary RNA or DNA with higher affinity and specificity than conventional oligonucleotides and oligonucleotide analogs. The properties of PNA enable novel molecular biology and biochemistry applications unachievable with traditional oligonucleotides and peptides.

[0144] Additional examples of nucleic acid modifications that improve the binding properties and/or stability of a nucleic acid include the use of base analogs such as inosine, intercalators (U.S. Pat. No. 4,835,263) and the minor groove binders (U.S. Pat. No. 5,801,115). Thus, references herein to nucleic acid molecules, SNP-containing nucleic acid molecules, SNP detection reagents (e.g., probes and primers), oligonucleotides/polynucleotides include PNA oligomers and other nucleic acid analogs. Other examples of nucleic acid analogs and alternative/modified nucleic acid chemistries known in the art are described in Current Protocols in Nucleic Acid Chemistry, John Wiley & Sons, N.Y. (2002).

[0145] The present invention further provides nucleic acid molecules that encode fragments of the variant polypeptides disclosed herein as well as nucleic acid molecules that encode obvious variants of such variant polypeptides. Such nucleic acid molecules may be naturally occurring, such as paralogs (different locus) and orthologs (different organism), or may be constructed by recombinant DNA methods or by chemical synthesis. Non-naturally occurring variants may be made by mutagenesis techniques, including those applied to nucleic acid molecules, cells, or organisms. Accordingly, the variants can contain nucleotide substitutions, deletions, inversions and insertions (in addition to the SNPs disclosed in Tables 1 and 2). Variation can occur in either or both the coding and non-coding regions. The variations can produce conservative and/or non-conservative amino acid substitutions.

[0146] Further variants of the nucleic acid molecules disclosed in Tables 1 and 2, such as naturally occurring allelic variants (as well as orthologs and paralogs) and synthetic variants produced by mutagenesis techniques, can be identified and/or produced using methods well known in the art. Such further variants can comprise a nucleotide sequence that shares at least 70-80%, 80-85%, 85-90%, 91%, 92%, 93%, 94%, 95%, 96%, 97%, 98%, or 99% sequence identity with a nucleic acid sequence disclosed in Table 1 and/or Table 2 (or a fragment thereof) and that includes a novel SNP allele disclosed in Table 1 and/or Table 2. Further, variants can comprise a nucleotide sequence that encodes a polypeptide that shares at least 70-80%, 80-85%, 85-90%, 91%, 92%, 93%, 94%, 95%, 96%, 97%, 98%, or 99% sequence identity with a polypeptide sequence disclosed in Table 1 (or a fragment thereof) and that includes a novel SNP allele disclosed in Table 1 and/or Table 2. Thus, an aspect of the present invention that is specifically contemplated are isolated nucleic acid molecules that have a certain degree of sequence variation compared with the sequences shown in Tables 1-2, but that contain a novel SNP allele disclosed herein. In other words, as long as an isolated nucleic acid molecule contains a novel SNP allele disclosed herein, other portions of the nucleic acid molecule that flank the novel SNP allele can vary to some degree from the specific transcript, genomic, and context sequences referred to and shown in Tables 1 and 2, and can encode a polypeptide that varies to some degree from the specific polypeptide sequences referred to in Table 1.

[0147] To determine the percent identity of two amino acid sequences or two nucleotide sequences of two molecules that share sequence homology, the sequences are aligned for optimal comparison purposes (e.g., gaps can be introduced in one or both of a first and a second amino acid or nucleic acid sequence for optimal alignment and non-homologous sequences can be disregarded for comparison purposes). In a preferred embodiment, at least 30%, 40%, 50%, 60%, 70%, 80%, or 90% or more of the length of a reference sequence is aligned for comparison purposes. The amino acid residues or nucleotides at corresponding amino acid positions or nucleotide positions are then compared. When a position in the first sequence is occupied by the same amino acid residue or nucleotide as the corresponding position in the second sequence, then the molecules are identical at that position (as used herein, amino acid or nucleic acid “identity” is equivalent to amino acid or nucleic acid “homology”). The percent identity between the two sequences is a function of the number of identical positions shared by the sequences, taking into account the number of gaps, and the length of each gap, which need to be introduced for optimal alignment of the two sequences.

[0148] The comparison of sequences and determination of percent identity between two sequences can be accomplished using a mathematical algorithm. Computational Molecular Biology, A. M. Lesk, ed., Oxford University Press, N.Y (1988); Biocomputing: Informatics and Genome Projects, D. W. Smith, ed., Academic Press, N.Y. (1993); Computer Analysis of Sequence Data, Part 1, A. M. Griffin and H. G. Griffin, eds., Humana Press, N.J. (1994); Sequence Analysis in Molecular Biology, G. von Heinje, ed., Academic Press, N.Y. (1987); and Sequence Analysis Primer, M. Gribskov and J. Devereux, eds., M. Stockton Press, N.Y. (1991). In a preferred embodiment, the percent identity between two amino acid sequences is determined using the Needleman and Wunsch algorithm (J Mol Biol (48):444-453 (1970)) which has been incorporated into the GAP program in the GCG software package, using either a Blossom 62 matrix or a PAM250 matrix, and a gap weight of 16, 14, 12, 10, 8, 6, or 4 and a length weight of 1, 2, 3, 4, 5, or 6.

[0149] In yet another preferred embodiment, the percent identity between two nucleotide sequences is determined using the GAP program in the GCG software package using a NWSgapdna.CMP matrix and a gap weight of 40, 50, 60, 70, or 80 and a length weight of 1, 2, 3, 4, 5, or 6. J. Devereux et al., Nucleic Acids Res. 12(1):387 (1984). In another embodiment, the percent identity between two amino acid or nucleotide sequences is determined using the algorithm of E. Myers and W. Miller (CABIOS 4:11-17 (1989)) which has been incorporated into the ALIGN program (version 2.0), using a PAM120 weight residue table, a gap length penalty of 12, and a gap penalty of 4.

[0150] The nucleotide and amino acid sequences of the present invention can further be used as a “query sequence” to perform a search against sequence databases; for example, to identify other family members or related sequences. Such searches can be performed using the NBLAST and XBLAST programs (version 2.0). Altschul et al., J Mol Biol 215:403-10 (1990). BLAST nucleotide searches can be performed with the NBLAST program, score=100, wordlength=12 to obtain nucleotide sequences homologous to the nucleic acid molecules of the invention. BLAST protein searches can be performed with the XBLAST program, score=50, wordlength=3 to obtain amino acid sequences homologous to the proteins of the invention. To obtain gapped alignments for comparison purposes, Gapped BLAST can be utilized. Altschul et al., Nucleic Acids Res 25(17):3389-3402 (1997). When utilizing BLAST and gapped BLAST programs, the default parameters of the respective programs (e.g., XBLAST and NBLAST) can be used. In addition to BLAST, examples of other search and sequence comparison programs used in the art include, but are not limited to, FASTA (Pearson, Methods Mol Biol 25, 365-389 (1994)) and KERR (Dufresne et al., Nat Biotechnol 20(12): 1269-71 (December 2002)). For further information regarding bioinformatics techniques, see Current Protocols in Bioinformatics, John Wiley & Sons, Inc., N.Y.

[0151] The present invention further provides non-coding fragments of the nucleic acid molecules disclosed in Table 1 and/or Table 2. Preferred non-coding fragments include, but are not limited to, promoter sequences, enhancer sequences, intronic sequences, 5′ untranslated regions (UTRs), 3′ untranslated regions, gene modulating sequences and gene termination sequences. Such fragments are useful, for example, in controlling heterologous gene expression and in developing screens to identify gene-modulating agents.

[0152] SNP Detection Reagents

[0153] In a specific aspect of the present invention, the SNPs disclosed in Table 1 and/or Table 2, and their associated transcript sequences (referred to in Table 1 as SEQ ID NOS: 1-20), genomic sequences (referred to in Table 2 as SEQ ID NOS: 72-82), and context sequences (transcript-based context sequences are referred to in Table 1 as SEQ ID NOS: 41-71; genomic-based context sequences are provided in Table 2 as SEQ ID NOS: 83-187), can be used for the design of SNP detection reagents. The actual sequences referred to in the tables are provided in the Sequence Listing. As used herein, a “SNP detection reagent” is a reagent that specifically detects a specific target SNP position disclosed herein, and that is preferably specific for a particular nucleotide (allele) of the target SNP position (i.e., the detection reagent preferably can differentiate between different alternative nucleotides at a target SNP position, thereby allowing the identity of the nucleotide present at the target SNP position to be determined). Typically, such detection reagent hybridizes to a target SNP-containing nucleic acid molecule by complementary base-pairing in a sequence specific manner, and discriminates the target variant sequence from other nucleic acid sequences such as an art-known form in a test sample. An example of a detection reagent is a probe that hybridizes to a target nucleic acid containing one or more of the SNPs referred to in Table 1 and/or Table 2. In a preferred embodiment, such a probe can differentiate between nucleic acids having a particular nucleotide (allele) at a target SNP position from other nucleic acids that have a different nucleotide at the same target SNP position. In addition, a detection reagent may hybridize to a specific region 5′ and/or 3′ to a SNP position, particularly a region corresponding to the context sequences referred to in Table 1 and/or Table 2 (transcript-based context sequences are referred to in Table 1 as SEQ ID NOS: 41-70; genomic-based context sequences are referred to in Table 2 as SEQ ID NOS: 83-187). Another example of a detection reagent is a primer that acts as an initiation point of nucleotide extension along a complementary strand of a target polynucleotide. The SNP sequence information provided herein is also useful for designing primers, e.g. allele-specific primers, to amplify (e.g., using PCR) any SNP of the present invention.

[0154] In one preferred embodiment of the invention, a SNP detection reagent is an isolated or synthetic DNA or RNA polynucleotide probe or primer or PNA oligomer, or a combination of DNA, RNA and/or PNA, that hybridizes to a segment of a target nucleic acid molecule containing a SNP identified in Table 1 and/or Table 2. A detection reagent in the form of a polynucleotide may optionally contain modified base analogs, intercalators or minor groove binders. Multiple detection reagents such as probes may be, for example, affixed to a solid support (e.g., arrays or beads) or supplied in solution (e.g. probe/primer sets for enzymatic reactions such as PCR, RT-PCR, TaqMan assays, or primer-extension reactions) to form a SNP detection kit.

[0155] A probe or primer typically is a substantially purified oligonucleotide or PNA oligomer. Such oligonucleotide typically comprises a region of complementary nucleotide sequence that hybridizes under stringent conditions to at least about 8, 10, 12, 16, 18, 20, 22, 25, 30, 40, 50, 55, 60, 65, 70, 80, 90, 100, 120 (or any other number in-between) or more consecutive nucleotides in a target nucleic acid molecule. Depending on the particular assay, the consecutive nucleotides can either include the target SNP position, or be a specific region in close enough proximity 5′ and/or 3′ to the SNP position to carry out the desired assay.

[0156] Other preferred primer and probe sequences can readily be determined using the transcript sequences (SEQ ID NOS: 1-20), genomic sequences (SEQ ID NOS: 72-82), and SNP context sequences (transcript-based context sequences are referred to in Table 1 as SEQ ID NOS: 41-71; genomic-based context sequences are referred to in Table 2 as SEQ ID NOS: 83-187) disclosed in the Sequence Listing and in Tables 1 and 2. The actual sequences referred to in the tables are provided in the Sequence Listing. It will be apparent to one of skill in the art that such primers and probes are directly useful as reagents for genotyping the SNPs of the present invention, and can be incorporated into any kit/system format.

[0157] In order to produce a probe or primer specific for a target SNP-containing sequence, the gene/transcript and/or context sequence surrounding the SNP of interest is typically examined using a computer algorithm that starts at the 5′ or at the 3′ end of the nucleotide sequence. Typical algorithms will then identify oligomers of defined length that are unique to the gene/SNP context sequence, have a GC content within a range suitable for hybridization, lack predicted secondary structure that may interfere with hybridization, and/or possess other desired characteristics or that lack other undesired characteristics.

[0158] A primer or probe of the present invention is typically at least about 8 nucleotides in length. In one embodiment of the invention, a primer or a probe is at least about 10 nucleotides in length. In a preferred embodiment, a primer or a probe is at least about 12 nucleotides in length. In a more preferred embodiment, a primer or probe is at least about 16, 17, 18, 19, 20, 21, 22, 23, 24 or 25 nucleotides in length. While the maximal length of a probe can be as long as the target sequence to be detected, depending on the type of assay in which it is employed, it is typically less than about 50, 60, 65, or 70 nucleotides in length. In the case of a primer, it is typically less than about 30 nucleotides in length. In a specific preferred embodiment of the invention, a primer or a probe is within the length of about 18 and about 28 nucleotides. However, in other embodiments, such as nucleic acid arrays and other embodiments in which probes are affixed to a substrate, the probes can be longer, such as on the order of 30-70, 75, 80, 90, 100, or more nucleotides in length (see the section below entitled “SNP Detection Kits and Systems”).

[0159] For analyzing SNPs, it may be appropriate to use oligonucleotides specific for alternative SNP alleles. Such oligonucleotides that detect single nucleotide variations in target sequences may be referred to by such terms as “allele-specific oligonucleotides,” “allele-specific probes,” or “allele-specific primers.” The design and use of allele-specific probes for analyzing polymorphisms is described in, e.g., Mutation Detection: A Practical Approach, Cotton et al., eds., Oxford University Press (1998); Saiki et al., Nature 324:163-166 (1986); Dattagupta, EP235,726; and Saiki, W O 89/11548.

[0160] While the design of each allele-specific primer or probe depends on variables such as the precise composition of the nucleotide sequences flanking a SNP position in a target nucleic acid molecule, and the length of the primer or probe, another factor in the use of primers and probes is the stringency of the condition under which the hybridization between the probe or primer and the target sequence is performed. Higher stringency conditions utilize buffers with lower ionic strength and/or a higher reaction temperature, and tend to require a more perfect match between probe/primer and a target sequence in order to form a stable duplex. If the stringency is too high, however, hybridization may not occur at all. In contrast, lower stringency conditions utilize buffers with higher ionic strength and/or a lower reaction temperature, and permit the formation of stable duplexes with more mismatched bases between a probe/primer and a target sequence. By way of example and not limitation, exemplary conditions for high stringency hybridization conditions using an allele-specific probe are as follows: prehybridization with a solution containing 5× standard saline phosphate EDTA (SSPE), 0.5% NaDodSO₄ (SDS) at 55° C., and incubating probe with target nucleic acid molecules in the same solution at the same temperature, followed by washing with a solution containing 2×SSPE, and 0.1% SDS at 55° C. or room temperature.

[0161] Moderate stringency hybridization conditions may be used for allele-specific primer extension reactions with a solution containing, e.g., about 50 mM KCl at about 46° C. Alternatively, the reaction may be carried out at an elevated temperature such as 60° C. In another embodiment, a moderately stringent hybridization condition suitable for oligonucleotide ligation assay (OLA) reactions wherein two probes are ligated if they are completely complementary to the target sequence may utilize a solution of about 100 mM KCl at a temperature of 46° C.

[0162] In a hybridization-based assay, allele-specific probes can be designed that hybridize to a segment of target DNA from one individual but do not hybridize to the corresponding segment from another individual due to the presence of different polymorphic forms (e.g., alternative SNP alleles/nucleotides) in the respective DNA segments from the two individuals. Hybridization conditions should be sufficiently stringent that there is a significant detectable difference in hybridization intensity between alleles, and preferably an essentially binary response, whereby a probe hybridizes to only one of the alleles or significantly more strongly to one allele. While a probe may be designed to hybridize to a target sequence that contains a SNP site such that the SNP site aligns anywhere along the sequence of the probe, the probe is preferably designed to hybridize to a segment of the target sequence such that the SNP site aligns with a central position of the probe (e.g., a position within the probe that is at least three nucleotides from either end of the probe). This design of probe generally achieves good discrimination in hybridization between different allelic forms.

[0163] In another embodiment, a probe or primer may be designed to hybridize to a segment of target DNA such that the SNP aligns with either the 5′ most end or the 3′ most end of the probe or primer. In a specific preferred embodiment that is particularly suitable for use in a oligonucleotide ligation assay (U.S. Pat. No. 4,988,617), the 3′ most nucleotide of the probe aligns with the SNP position in the target sequence.

[0164] Oligonucleotide probes and primers may be prepared by methods well known in the art. Chemical synthetic methods include, but are not limited to, the phosphotriester method described by Narang et al., Methods in Enzymology 68:90 (1979); the phosphodiester method described by Brown et al., Methods in Enzymology 68:109 (1979); the diethylphosphoamidate method described by Beaucage et al., Tetrahedron Letters 22:1859 (1981); and the solid support method described in U.S. Pat. No. 4,458,066.

[0165] Allele-specific probes are often used in pairs (or, less commonly, in sets of 3 or 4, such as if a SNP position is known to have 3 or 4 alleles, respectively, or to assay both strands of a nucleic acid molecule for a target SNP allele), and such pairs may be identical except for a one nucleotide mismatch that represents the allelic variants at the SNP position. Commonly, one member of a pair perfectly matches a reference form of a target sequence that has a more common SNP allele (i.e., the allele that is more frequent in the target population) and the other member of the pair perfectly matches a form of the target sequence that has a less common SNP allele (i.e., the allele that is rarer in the target population). In the case of an array, multiple pairs of probes can be immobilized on the same support for simultaneous analysis of multiple different polymorphisms.

[0166] In one type of PCR-based assay, an allele-specific primer hybridizes to a region on a target nucleic acid molecule that overlaps a SNP position and only primes amplification of an allelic form to which the primer exhibits perfect complementarity. Gibbs, Nucleic Acid Res 17:2427-2448 (1989). Typically, the primer's 3′-most nucleotide is aligned with and complementary to the SNP position of the target nucleic acid molecule. This primer is used in conjunction with a second primer that hybridizes at a distal site. Amplification proceeds from the two primers, producing a detectable product that indicates which allelic form is present in the test sample. A control is usually performed with a second pair of primers, one of which shows a single base mismatch at the polymorphic site and the other of which exhibits perfect complementarity to a distal site. The single-base mismatch prevents amplification or substantially reduces amplification efficiency, so that either no detectable product is formed or it is formed in lower amounts or at a slower pace. The method generally works most effectively when the mismatch is at the 3′-most position of the oligonucleotide (i.e., the 3′-most position of the oligonucleotide aligns with the target SNP position) because this position is most destabilizing to elongation from the primer (see, e.g., WO 93/22456). This PCR-based assay can be utilized as part of the TaqMan assay, described below.

[0167] In a specific embodiment of the invention, a primer of the invention contains a sequence substantially complementary to a segment of a target SNP-containing nucleic acid molecule except that the primer has a mismatched nucleotide in one of the three nucleotide positions at the 3′-most end of the primer, such that the mismatched nucleotide does not base pair with a particular allele at the SNP site. In a preferred embodiment, the mismatched nucleotide in the primer is the second from the last nucleotide at the 3′-most position of the primer. In a more preferred embodiment, the mismatched nucleotide in the primer is the last nucleotide at the 3′-most position of the primer.

[0168] In another embodiment of the invention, a SNP detection reagent of the invention is labeled with a fluorogenic reporter dye that emits a detectable signal. While the preferred reporter dye is a fluorescent dye, any reporter dye that can be attached to a detection reagent such as an oligonucleotide probe or primer is suitable for use in the invention. Such dyes include, but are not limited to, Acridine, AMCA, BODIPY, Cascade Blue, Cy2, Cy3, Cy5, Cy7, Dabcyl, Edans, Eosin, Erythrosin, Fluorescein, 6-Fam, Tet, Joe, Hex, Oregon Green, Rhodamine, Rhodol Green, Tamra, Rox, and Texas Red.

[0169] In yet another embodiment of the invention, the detection reagent may be further labeled with a quencher dye such as Tamra, especially when the reagent is used as a self-quenching probe such as a TaqMan (U.S. Pat. Nos. 5,210,015 and 5,538,848) or Molecular Beacon probe (U.S. Pat. Nos. 5,118,801 and 5,312,728), or other stemless or linear beacon probe (Livak et al., PCR Method Appl 4:357-362 (1995); Tyagi et al., Nature Biotechnology 14:303-308 (1996); Nazarenko et al., Nucl Acids Res 25:2516-2521 (1997); U.S. Pat. Nos. 5,866,336 and 6,117,635.

[0170] The detection reagents of the invention may also contain other labels, including but not limited to, biotin for streptavidin binding, hapten for antibody binding, and oligonucleotide for binding to another complementary oligonucleotide such as pairs of zipcodes.

[0171] The present invention also contemplates reagents that do not contain (or that are complementary to) a SNP nucleotide identified herein but that are used to assay one or more SNPs disclosed herein. For example, primers that flank, but do not hybridize directly to a target SNP position provided herein are useful in primer extension reactions in which the primers hybridize to a region adjacent to the target SNP position (i.e., within one or more nucleotides from the target SNP site). During the primer extension reaction, a primer is typically not able to extend past a target SNP site if a particular nucleotide (allele) is present at that target SNP site, and the primer extension product can be detected in order to determine which SNP allele is present at the target SNP site. For example, particular ddNTPs are typically used in the primer extension reaction to terminate primer extension once a ddNTP is incorporated into the extension product (a primer extension product which includes a ddNTP at the 3′-most end of the primer extension product, and in which the ddNTP is a nucleotide of a SNP disclosed herein, is a composition that is specifically contemplated by the present invention). Thus, reagents that bind to a nucleic acid molecule in a region adjacent to a SNP site and that are used for assaying the SNP site, even though the bound sequences do not necessarily include the SNP site itself, are also contemplated by the present invention.

[0172] SNP Detection Kits and Systems

[0173] A person skilled in the art will recognize that, based on the SNP and associated sequence information disclosed herein, detection reagents can be developed and used to assay any SNP of the present invention individually or in combination, and such detection reagents can be readily incorporated into one of the established kit or system formats which are well known in the art. The terms “kits” and “systems,” as used herein in the context of SNP detection reagents, are intended to refer to such things as combinations of multiple SNP detection reagents, or one or more SNP detection reagents in combination with one or more other types of elements or components (e.g., other types of biochemical reagents, containers, packages such as packaging intended for commercial sale, substrates to which SNP detection reagents are attached, electronic hardware components, etc.). Accordingly, the present invention further provides SNP detection kits and systems, including but not limited to, packaged probe and primer sets (e.g. TaqMan probe/primer sets), arrays/microarrays of nucleic acid molecules, and beads that contain one or more probes, primers, or other detection reagents for detecting one or more SNPs of the present invention. The kits/systems can optionally include various electronic hardware components; for example, arrays (“DNA chips”) and microfluidic systems (“lab-on-a-chip” systems) provided by various manufacturers typically comprise hardware components. Other kits/systems (e.g., probe/primer sets) may not include electronic hardware components, but may be comprised of, for example, one or more SNP detection reagents (along with, optionally, other biochemical reagents) packaged in one or more containers.

[0174] In some embodiments, a SNP detection kit typically contains one or more detection reagents and other components (e.g. a buffer, enzymes such as DNA polymerases or ligases, chain extension nucleotides such as deoxynucleotide triphosphates, and in the case of Sanger-type DNA sequencing reactions, chain terminating nucleotides, positive control sequences, negative control sequences, and the like) necessary to carry out an assay or reaction, such as amplification and/or detection of a SNP-containing nucleic acid molecule. A kit may further contain means for determining the amount of a target nucleic acid, and means for comparing the amount with a standard, and can comprise instructions for using the kit to detect the SNP-containing nucleic acid molecule of interest. In one embodiment of the present invention, kits are provided which contain the necessary reagents to carry out one or more assays to detect one or more SNPs disclosed herein. In a preferred embodiment of the present invention, SNP detection kits/systems are in the form of nucleic acid arrays, or compartmentalized kits, including microfluidic/lab-on-a-chip systems.

[0175] SNP detection kits/systems may contain, for example, one or more probes, or pairs of probes, that hybridize to a nucleic acid molecule at or near each target SNP position. Multiple pairs of allele-specific probes may be included in the kit/system to simultaneously assay large numbers of SNPs, at least one of which is a SNP of the present invention. In some kits/systems, the allele-specific probes are immobilized to a substrate such as an array or bead. For example, the same substrate can comprise allele-specific probes for detecting at least 1; 10; 100; 1000; 10,000; 100,000 (or any other number in-between) or substantially all of the SNPs shown in Table 1 and/or Table 2.

[0176] The terms “arrays,” “microarrays,” and “DNA chips” are used herein interchangeably to refer to an array of distinct polynucleotides affixed to a substrate, such as glass, plastic, paper, nylon or other type of membrane, filter, chip, or any other suitable solid support. The polynucleotides can be synthesized directly on the substrate, or synthesized separate from the substrate and then affixed to the substrate. In one embodiment, the microarray is prepared and used according to the methods described in Chee et al., U.S. Pat. No. 5,837,832 and PCT application WO95/11995; D. J. Lockhart et al., Nat Biotech 14:1675-1680 (1996); and M. Schena et al., Proc Natl Acad Sci 93:10614-10619 (1996), all of which are incorporated herein in their entirety by reference. In other embodiments, such arrays are produced by the methods described by Brown et al., U.S. Pat. No. 5,807,522.

[0177] Nucleic acid arrays are reviewed in the following references: Zammatteo et al., “New chips for molecular biology and diagnostics,” Biotechnol Annu Rev 8:85-101 (2002); Sosnowski et al., “Active microelectronic array system for DNA hybridization, genotyping and pharmacogenomic applications,” Psychiatr Genet. 12(4):181-92 (December 2002); Heller, “DNA microarray technology: devices, systems, and applications,” Annu Rev Biomed Eng 4:129-53 (2002); Epub Mar. 22, 2002; Kolchinsky et al., “Analysis of SNPs and other genomic variations using gel-based chips,” Hum Mutat 19(4):343-60 (April 2002); and McGall et al., “High-density genechip oligonucleotide probe arrays,” Adv Biochem Eng Biotechnol 77:21-42 (2002).

[0178] Any number of probes, such as allele-specific probes, may be implemented in an array, and each probe or pair of probes can hybridize to a different SNP position. In the case of polynucleotide probes, they can be synthesized at designated areas (or synthesized separately and then affixed to designated areas) on a substrate using a light-directed chemical process. Each DNA chip can contain, for example, thousands to millions of individual synthetic polynucleotide probes arranged in a grid-like pattern and miniaturized (e.g., to the size of a dime). Preferably, probes are attached to a solid support in an ordered, addressable array.

[0179] A microarray can be composed of a large number of unique, single-stranded polynucleotides, usually either synthetic antisense polynucleotides or fragments of cDNAs, fixed to a solid support. Typical polynucleotides are preferably about 6-60 nucleotides in length, more preferably about 15-30 nucleotides in length, and most preferably about 18-25 nucleotides in length. For certain types of microarrays or other detection kits/systems, it may be preferable to use oligonucleotides that are only about 7-20 nucleotides in length. In other types of arrays, such as arrays used in conjunction with chemiluminescent detection technology, preferred probe lengths can be, for example, about 15-80 nucleotides in length, preferably about 50-70 nucleotides in length, more preferably about 55-65 nucleotides in length, and most preferably about 60 nucleotides in length. The microarray or detection kit can contain polynucleotides that cover the known 5′ or 3′ sequence of a gene/transcript or target SNP site, sequential polynucleotides that cover the full-length sequence of a gene/transcript; or unique polynucleotides selected from particular areas along the length of a target gene/transcript sequence, particularly areas corresponding to one or more SNPs disclosed in Table 1 and/or Table 2. Polynucleotides used in the microarray or detection kit can be specific to a SNP or SNPs of interest (e.g., specific to a particular SNP allele at a target SNP site, or specific to particular SNP alleles at multiple different SNP sites), or specific to a polymorphic gene/transcript or genes/transcripts of interest.

[0180] Hybridization assays based on polynucleotide arrays rely on the differences in hybridization stability of the probes to perfectly matched and mismatched target sequence variants. For SNP genotyping, it is generally preferable that stringency conditions used in hybridization assays are high enough such that nucleic acid molecules that differ from one another at as little as a single SNP position can be differentiated (e.g., typical SNP hybridization assays are designed so that hybridization will occur only if one particular nucleotide is present at a SNP position, but will not occur if an alternative nucleotide is present at that SNP position). Such high stringency conditions may be preferable when using, for example, nucleic acid arrays of allele-specific probes for SNP detection. Such high stringency conditions are described in the preceding section, and are well known to those skilled in the art and can be found in, for example, Current Protocols in Molecular Biology 6.3.1-6.3.6, John Wiley & Sons, N.Y. (1989).

[0181] In other embodiments, the arrays are used in conjunction with chemiluminescent detection technology. The following patents and patent applications, which are all hereby incorporated by reference, provide additional information pertaining to chemiluminescent detection. U.S. patent applications that describe chemiluminescent approaches for microarray detection: Ser. Nos. 10/620,332 and 10/620,333. U.S. patents that describe methods and compositions of dioxetane for performing chemiluminescent detection: U.S. Pat. Nos. 6,124,478; 6,107,024; 5,994,073; 5,981,768; 5,871,938; 5,843,681; 5,800,999 and 5,773,628. And the U.S. published application that discloses methods and compositions for microarray controls: US2002/0110828.

[0182] In one embodiment of the invention, a nucleic acid array can comprise an array of probes of about 15-25 nucleotides in length. In further embodiments, a nucleic acid array can comprise any number of probes, in which at least one probe is capable of detecting one or more SNPs disclosed in Table 1 and/or Table 2, and/or at least one probe comprises a fragment of one of the sequences selected from the group consisting of those disclosed in Table 1, Table 2, the Sequence Listing, and sequences complementary thereto, said fragment comprising at least about 8 consecutive nucleotides, preferably 10, 12, 15, 16, 18, 20, more preferably 22, 25, 30, 40, 47, 50, 55, 60, 65, 70, 80, 90, 100, or more consecutive nucleotides (or any other number in-between) and containing (or being complementary to) a novel SNP allele disclosed in Table 1 and/or Table 2. In some embodiments, the nucleotide complementary to the SNP site is within 5, 4, 3, 2, or 1 nucleotide from the center of the probe, more preferably at the center of said probe.

[0183] A polynucleotide probe can be synthesized on the surface of the substrate by using a chemical coupling procedure and an ink jet application apparatus, as described in PCT application WO95/251116 (Baldeschweiler et al.) which is incorporated herein in its entirety by reference. In another aspect, a “gridded” array analogous to a dot (or slot) blot may be used to arrange and link cDNA fragments or oligonucleotides to the surface of a substrate using a vacuum system, thermal, UV, mechanical or chemical bonding procedures. An array, such as those described above, may be produced by hand or by using available devices (slot blot or dot blot apparatus), materials (any suitable solid support), and machines (including robotic instruments), and may contain 8, 24, 96, 384, 1536, 6144 or more polynucleotides, or any other number which lends itself to the efficient use of commercially available instrumentation.

[0184] Using such arrays or other kits/systems, the present invention provides methods of identifying the SNPs disclosed herein in a test sample. Such methods typically involve incubating a test sample of nucleic acids with an array comprising one or more probes corresponding to at least one SNP position of the present invention, and assaying for binding of a nucleic acid from the test sample with one or more of the probes. Conditions for incubating a SNP detection reagent (or a kit/system that employs one or more such SNP detection reagents) with a test sample vary. Incubation conditions depend on such factors as the format employed in the assay, the detection methods employed, and the type and nature of the detection reagents used in the assay. One skilled in the art will recognize that any one of the commonly available hybridization, amplification and array assay formats can readily be adapted to detect the SNPs disclosed herein.

[0185] A SNP detection kit/system of the present invention may include components that are used to prepare nucleic acids from a test sample for the subsequent amplification and/or detection of a SNP-containing nucleic acid molecule. Such sample preparation components can be used to produce nucleic acid extracts (including DNA and/or RNA), proteins or membrane extracts from any bodily fluids (such as blood, serum, plasma, urine, saliva, phlegm, gastric juices, semen, tears, sweat, etc.), skin, hair, cells (especially nucleated cells), biopsies, buccal swabs or tissue specimens. The test samples used in the above-described methods will vary based on such factors as the assay format, nature of the detection method, and the specific tissues, cells or extracts used as the test sample to be assayed. Methods of preparing nucleic acids, proteins, and cell extracts are well known in the art and can be readily adapted to obtain a sample that is compatible with the system utilized. Automated sample preparation systems for extracting nucleic acids from a test sample are commercially available, and examples are Qiagen's BioRobot 9600, Applied Biosystems' PRISM™ 6700 sample preparation system, and Roche Molecular Systems' COBAS AmpliPrep System.

[0186] Another form of kit contemplated by the present invention is a compartmentalized kit. A compartmentalized kit includes any kit in which reagents are contained in separate containers. Such containers include, for example, small glass containers, plastic containers, strips of plastic, glass or paper, or arraying material such as silica. Such containers allow one to efficiently transfer reagents from one compartment to another compartment such that the test samples and reagents are not cross-contaminated, or from one container to another vessel not included in the kit, and the agents or solutions of each container can be added in a quantitative fashion from one compartment to another or to another vessel. Such containers may include, for example, one or more containers which will accept the test sample, one or more containers which contain at least one probe or other SNP detection reagent for detecting one or more SNPs of the present invention, one or more containers which contain wash reagents (such as phosphate buffered saline, Tris-buffers, etc.), and one or more containers which contain the reagents used to reveal the presence of the bound probe or other SNP detection reagents. The kit can optionally further comprise compartments and/or reagents for, for example, nucleic acid amplification or other enzymatic reactions such as primer extension reactions, hybridization, ligation, electrophoresis (preferably capillary electrophoresis), mass spectrometry, and/or laser-induced fluorescent detection. The kit may also include instructions for using the kit. Exemplary compartmentalized kits include microfluidic devices known in the art. See, e.g., Weigl et al., “Lab-on-a-chip for drug development,” Adv Drug Deliv Rev 55(3):349-77 (February 2003). In such microfluidic devices, the containers may be referred to as, for example, microfluidic “compartments,” “chambers,” or “channels.”

[0187] Microfluidic devices, which may also be referred to as “lab-on-a-chip” systems, biomedical micro-electro-mechanical systems (bioMEMs), or multicomponent integrated systems, are exemplary kits/systems of the present invention for analyzing SNPs. Such systems miniaturize and compartmentalize processes such as probe/target hybridization, nucleic acid amplification, and capillary electrophoresis reactions in a single functional device. Such microfluidic devices typically utilize detection reagents in at least one aspect of the system, and such detection reagents may be used to detect one or more SNPs of the present invention. One example of a microfluidic system is disclosed in U.S. Pat. No. 5,589,136, which describes the integration of PCR amplification and capillary electrophoresis in chips. Exemplary microfluidic systems comprise a pattern of microchannels designed onto a glass, silicon, quartz, or plastic wafer included on a microchip. The movements of the samples may be controlled by electric, electroosmotic or hydrostatic forces applied across different areas of the microchip to create functional microscopic valves and pumps with no moving parts. Varying the voltage can be used as a means to control the liquid flow at intersections between the micro-machined channels and to change the liquid flow rate for pumping across different sections of the microchip. See, for example, U.S. Pat. Nos. 6,153,073, Dubrow et al., and 6,156,181, Parce et al.

[0188] For genotyping SNPs, an exemplary microfluidic system may integrate, for example, nucleic acid amplification, primer extension, capillary electrophoresis, and a detection method such as laser induced fluorescence detection. In a first step of an exemplary process for using such an exemplary system, nucleic acid samples are amplified, preferably by PCR. Then, the amplification products are subjected to automated primer extension reactions using ddNTPs (specific fluorescence for each ddNTP) and the appropriate oligonucleotide primers to carry out primer extension reactions which hybridize just upstream of the targeted SNP. Once the extension at the 3′ end is completed, the primers are separated from the unincorporated fluorescent ddNTPs by capillary electrophoresis. The separation medium used in capillary electrophoresis can be, for example, polyacrylamide, polyethyleneglycol or dextran. The incorporated ddNTPs in the single nucleotide primer extension products are identified by laser-induced fluorescence detection. Such an exemplary microchip can be used to process, for example, at least 96 to 384 samples, or more, in parallel.

[0189] Uses of Nucleic Acid Molecules

[0190] The nucleic acid molecules of the present invention have a variety of uses, especially in the diagnosis and treatment of CHD, and in particular MI. For example, the nucleic acid molecules are useful as hybridization probes, such as for genotyping SNPs in messenger RNA, transcript, cDNA, genomic DNA, amplified DNA or other nucleic acid molecules, and for isolating full-length cDNA and genomic clones encoding the variant peptides disclosed in Table 1 as well as their orthologs.

[0191] A probe can hybridize to any nucleotide sequence along the entire length of a nucleic acid molecule referred to in Table 1 and/or Table 2. Preferably, a probe of the present invention hybridizes to a region of a target sequence that encompasses a SNP position indicated in Table 1 and/or Table 2. More preferably, a probe hybridizes to a SNP-containing target sequence in a sequence-specific manner such that it distinguishes the target sequence from other nucleotide sequences which vary from the target sequence only by which nucleotide is present at the SNP site. Such a probe is particularly useful for detecting the presence of a SNP-containing nucleic acid in a test sample, or for determining which nucleotide (allele) is present at a particular SNP site (i.e., genotyping the SNP site).

[0192] A nucleic acid hybridization probe may be used for determining the presence, level, form, and/or distribution of nucleic acid expression. The nucleic acid whose level is determined can be DNA or RNA. Accordingly, probes specific for the SNPs described herein can be used to assess the presence, expression and/or gene copy number in a given cell, tissue, or organism. These uses are relevant for diagnosis of disorders involving an increase or decrease in gene expression relative to normal levels. In vitro techniques for detection of mRNA include, for example, Northern blot hybridizations and in situ hybridizations. In vitro techniques for detecting DNA include Southern blot hybridizations and in situ hybridizations. Sambrook and Russell, Molecular Cloning: A Laboratory Manual, Cold Spring Harbor Press, N.Y. (2000).

[0193] Probes can be used as part of a diagnostic test kit for identifying cells or tissues in which a variant protein is expressed, such as by measuring the level of a variant protein-encoding nucleic acid (e.g., mRNA) in a sample of cells from a subject or determining if a polynucleotide contains a SNP of interest.

[0194] Thus, the nucleic acid molecules of the invention can be used as hybridization probes to detect the SNPs disclosed herein, thereby determining whether an individual with the polymorphisms is at risk for MI or has developed early stage MI. Detection of a SNP associated with a disease phenotype provides a diagnostic tool for an active disease and/or genetic predisposition to the disease.

[0195] Furthermore, the nucleic acid molecules of the invention are therefore useful for detecting a gene (gene information is disclosed in Table 2, for example) which contains a SNP disclosed herein and/or products of such genes, such as expressed mRNA transcript molecules (transcript information is disclosed in Table 1, for example), and are thus useful for detecting gene expression. The nucleic acid molecules can optionally be implemented in, for example, an array or kit format for use in detecting gene expression.

[0196] The nucleic acid molecules of the invention are also useful as primers to amplify any given region of a nucleic acid molecule, particularly a region containing a SNP identified in Table 1 and/or Table 2.

[0197] The nucleic acid molecules of the invention are also useful for constructing recombinant vectors (described in greater detail below). Such vectors include expression vectors that express a portion of, or all of, any of the variant peptide sequences referred to in Table 1. Vectors also include insertion vectors, used to integrate into another nucleic acid molecule sequence, such as into the cellular genome, to alter in situ expression of a gene and/or gene product. For example, an endogenous coding sequence can be replaced via homologous recombination with all or part of the coding region containing one or more specifically introduced SNPs.

[0198] The nucleic acid molecules of the invention are also useful for expressing antigenic portions of the variant proteins, particularly antigenic portions that contain a variant amino acid sequence (e.g., an amino acid substitution) caused by a SNP disclosed in Table 1 and/or Table 2.

[0199] The nucleic acid molecules of the invention are also useful for constructing vectors containing a gene regulatory region of the nucleic acid molecules of the present invention.

[0200] The nucleic acid molecules of the invention are also useful for designing ribozymes corresponding to all, or a part, of an mRNA molecule expressed from a SNP-containing nucleic acid molecule described herein.

[0201] The nucleic acid molecules of the invention are also useful for constructing host cells expressing a part, or all, of the nucleic acid molecules and variant peptides.

[0202] The nucleic acid molecules of the invention are also useful for constructing transgenic animals expressing all, or a part, of the nucleic acid molecules and variant peptides. The production of recombinant cells and transgenic animals having nucleic acid molecules which contain the SNPs disclosed in Table 1 and/or Table 2 allows, for example, effective clinical design of treatment compounds and dosage regimens.

[0203] The nucleic acid molecules of the invention are also useful in assays for drug screening to identify compounds that, for example, modulate nucleic acid expression.

[0204] The nucleic acid molecules of the invention are also useful in gene therapy in patients whose cells have aberrant gene expression. Thus, recombinant cells, which include a patient's cells that have been engineered ex vivo and returned to the patient, can be introduced into an individual where the recombinant cells produce the desired protein to treat the individual.

[0205] SNP Genotyping Methods

[0206] The process of determining which specific nucleotide (i.e., allele) is present at each of one or more SNP positions, such as a SNP position in a nucleic acid molecule disclosed in Table 1 and/or Table 2, is referred to as SNP genotyping. The present invention provides methods of SNP genotyping, such as for use in screening for CHD, and in particular MI, or related pathologies, or determining predisposition thereto, or determining responsiveness to a form of treatment, or in genome mapping or SNP association analysis, etc.

[0207] Nucleic acid samples can be genotyped to determine which allele(s) is/are present at any given genetic region (e.g., SNP position) of interest by methods well known in the art. The neighboring sequence can be used to design SNP detection reagents such as oligonucleotide probes, which may optionally be implemented in a kit format. Exemplary SNP genotyping methods are described in Chen et al., “Single nucleotide polymorphism genotyping: biochemistry, protocol, cost and throughput,” Pharmacogenomics J 3(2):77-96 (2003); Kwok et al., “Detection of single nucleotide polymorphisms,” Curr Issues Mol Biol 5(2):43-60 (April 2003); Shi, “Technologies for individual genotyping: detection of genetic polymorphisms in drug targets and disease genes,” Am J Pharmacogenomics 2(3): 197-205 (2002); and Kwok, “Methods for genotyping single nucleotide polymorphisms,” Annu Rev Genomics Hum Genet. 2:235-58 (2001). Exemplary techniques for high-throughput SNP genotyping are described in Marnellos, “High-throughput SNP analysis for genetic association studies,” Curr Opin Drug Discov Devel 6(3):317-21 (May 2003). Common SNP genotyping methods include, but are not limited to, TaqMan assays, molecular beacon assays, nucleic acid arrays, allele-specific primer extension, allele-specific PCR, arrayed primer extension, homogeneous primer extension assays, primer extension with detection by mass spectrometry, pyrosequencing, multiplex primer extension sorted on genetic arrays, ligation with rolling circle amplification, homogeneous ligation, OLA (U.S. Pat. No. 4,988,167), multiplex ligation reaction sorted on genetic arrays, restriction-fragment length polymorphism, single base extension-tag assays, and the Invader assay. Such methods may be used in combination with detection mechanisms such as, for example, luminescence or chemiluminescence detection, fluorescence detection, time-resolved fluorescence detection, fluorescence resonance energy transfer, fluorescence polarization, mass spectrometry, and electrical detection.

[0208] Various methods for detecting polymorphisms include, but are not limited to, methods in which protection from cleavage agents is used to detect mismatched bases in RNA/RNA or RNA/DNA duplexes (Myers et al., Science 230:1242 (1985); Cotton et al., PNAS 85:4397 (1988); and Saleeba et al., Meth. Enzymol 217:286-295 (1992)), comparison of the electrophoretic mobility of variant and wild type nucleic acid molecules (Orita et al., PNAS 86:2766 (1989); Cotton et al., Mutat Res 285:125-144 (1993); and Hayashi et al., Genet Anal Tech Appl 9:73-79 (1992)), and assaying the movement of polymorphic or wild-type fragments in polyacrylamide gels containing a gradient of denaturant using denaturing gradient gel electrophoresis (DGGE) (Myers et al., Nature 313:495 (1985)). Sequence variations at specific locations can also be assessed by nuclease protection assays such as RNase and S1 protection or chemical cleavage methods.

[0209] In a preferred embodiment, SNP genotyping is performed using the TaqMan assay, which is also known as the 5′ nuclease assay (U.S. Pat. Nos. 5,210,015 and 5,538,848). The TaqMan assay detects the accumulation of a specific amplified product during PCR. The TaqMan assay utilizes an oligonucleotide probe labeled with a fluorescent reporter dye and a quencher dye. The reporter dye is excited by irradiation at an appropriate wavelength, it transfers energy to the quencher dye in the same probe via a process called fluorescence resonance energy transfer (FRET). When attached to the probe, the excited reporter dye does not emit a signal. The proximity of the quencher dye to the reporter dye in the intact probe maintains a reduced fluorescence for the reporter. The reporter dye and quencher dye may be at the 5′ most and the 3′ most ends, respectively, or vice versa. Alternatively, the reporter dye may be at the 5′ or 3′ most end while the quencher dye is attached to an internal nucleotide, or vice versa. In yet another embodiment, both the reporter and the quencher may be attached to internal nucleotides at a distance from each other such that fluorescence of the reporter is reduced.

[0210] During PCR, the 5′ nuclease activity of DNA polymerase cleaves the probe, thereby separating the reporter dye and the quencher dye and resulting in increased fluorescence of the reporter. Accumulation of PCR product is detected directly by monitoring the increase in fluorescence of the reporter dye. The DNA polymerase cleaves the probe between the reporter dye and the quencher dye only if the probe hybridizes to the target SNP-containing template which is amplified during PCR, and the probe is designed to hybridize to the target SNP site only if a particular SNP allele is present.

[0211] Preferred TaqMan primer and probe sequences can readily be determined using the SNP and associated nucleic acid sequence information provided herein. A number of computer programs, such as Primer Express (Applied Biosystems, Foster City, Calif.), can be used to rapidly obtain optimal primer/probe sets. It will be apparent to one of skill in the art that such primers and probes for detecting the SNPs of the present invention are useful in diagnostic assays for CHD, and in particular MI and related pathologies, and can be readily incorporated into a kit format. The present invention also includes modifications of the Taqman assay well known in the art such as the use of Molecular Beacon probes (U.S. Pat. Nos. 5,118,801 and 5,312,728) and other variant formats (U.S. Pat. Nos. 5,866,336 and 6,117,635).

[0212] Another preferred method for genotyping the SNPs of the present invention is the use of two oligonucleotide probes in an OLA (see, e.g., U.S. Pat. No. 4,988,617). In this method, one probe hybridizes to a segment of a target nucleic acid with its 3′ most end aligned with the SNP site. A second probe hybridizes to an adjacent segment of the target nucleic acid molecule directly 3′ to the first probe. The two juxtaposed probes hybridize to the target nucleic acid molecule, and are ligated in the presence of a linking agent such as a ligase if there is perfect complementarity between the 3′ most nucleotide of the first probe with the SNP site. If there is a mismatch, ligation would not occur. After the reaction, the ligated probes are separated from the target nucleic acid molecule, and detected as indicators of the presence of a SNP.

[0213] The following patents, patent applications, and published international patent applications, which are all hereby incorporated by reference, provide additional information pertaining to techniques for carrying out various types of OLA. The following U.S. patents describe OLA strategies for performing SNP detection: U.S. Pat. Nos. 6,027,889; 6,268,148; 5,494,810; 5,830,711 and 6,054,564. WO 97/31256 and WO 00/56927 describe OLA strategies for performing SNP detection using universal arrays, wherein a zipcode sequence can be introduced into one of the hybridization probes, and the resulting product, or amplified product, hybridized to a universal zip code array. U.S. application US01/17329 (and 09/584,905) describes OLA (or LDR) followed by PCR, wherein zipcodes are incorporated into OLA probes, and amplified PCR products are determined by electrophoretic or universal zipcode array readout. U.S. applications 60/427,818, 60/445,636, and 60/445,494 describe SNPlex methods and software for multiplexed SNP detection using OLA followed by PCR, wherein zipcodes are incorporated into OLA probes, and amplified PCR products are hybridized with a zipchute reagent, and the identity of the SNP determined from electrophoretic readout of the zipchute. In some embodiments, OLA is carried out prior to PCR (or another method of nucleic acid amplification). In other embodiments, PCR (or another method of nucleic acid amplification) is carried out prior to OLA.

[0214] Another method for SNP genotyping is based on mass spectrometry. Mass spectrometry takes advantage of the unique mass of each of the four nucleotides of DNA. SNPs can be unambiguously genotyped by mass spectrometry by measuring the differences in the mass of nucleic acids having alternative SNP alleles. MALDI-TOF (Matrix Assisted Laser Desorption Ionization—Time of Flight) mass spectrometry technology is preferred for extremely precise determinations of molecular mass, such as SNPs. Numerous approaches to SNP analysis have been developed based on mass spectrometry. Preferred mass spectrometry-based methods of SNP genotyping include primer extension assays, which can also be utilized in combination with other approaches, such as traditional gel-based formats and microarrays.

[0215] Typically, the primer extension assay involves designing and annealing a primer to a template PCR amplicon upstream (5′) from a target SNP position. A mix of dideoxynucleotide triphosphates (ddNTPs) and/or deoxynucleotide triphosphates (dNTPs) are added to a reaction mixture containing template (e.g., a SNP-containing nucleic acid molecule which has typically been amplified, such as by PCR), primer, and DNA polymerase. Extension of the primer terminates at the first position in the template where a nucleotide complementary to one of the ddNTPs in the mix occurs. The primer can be either immediately adjacent (i.e., the nucleotide at the 3′ end of the primer hybridizes to the nucleotide next to the target SNP site) or two or more nucleotides removed from the SNP position. If the primer is several nucleotides removed from the target SNP position, the only limitation is that the template sequence between the 3′ end of the primer and the SNP position cannot contain a nucleotide of the same type as the one to be detected, or this will cause premature termination of the extension primer. Alternatively, if all four ddNTPs alone, with no dNTPs, are added to the reaction mixture, the primer will always be extended by only one nucleotide, corresponding to the target SNP position. In this instance, primers are designed to bind one nucleotide upstream from the SNP position (i.e., the nucleotide at the 3′ end of the primer hybridizes to the nucleotide that is immediately adjacent to the target SNP site on the 5′ side of the target SNP site). Extension by only one nucleotide is preferable, as it minimizes the overall mass of the extended primer, thereby increasing the resolution of mass differences between alternative SNP nucleotides. Furthermore, mass-tagged ddNTPs can be employed in the primer extension reactions in place of unmodified ddNTPs. This increases the mass difference between primers extended with these ddNTPs, thereby providing increased sensitivity and accuracy, and is particularly useful for typing heterozygous base positions. Mass-tagging also alleviates the need for intensive sample-preparation procedures and decreases the necessary resolving power of the mass spectrometer.

[0216] The extended primers can then be purified and analyzed by MALDI-TOF mass spectrometry to determine the identity of the nucleotide present at the target SNP position. In one method of analysis, the products from the primer extension reaction are combined with light absorbing crystals that form a matrix. The matrix is then hit with an energy source such as a laser to ionize and desorb the nucleic acid molecules into the gas-phase. The ionized molecules are then ejected into a flight tube and accelerated down the tube towards a detector. The time between the ionization event, such as a laser pulse, and collision of the molecule with the detector is the time of flight of that molecule. The time of flight is precisely correlated with the mass-to-charge ratio (m/z) of the ionized molecule. Ions with smaller m/z travel down the tube faster than ions with larger m/z and therefore the lighter ions reach the detector before the heavier ions. The time-of-flight is then converted into a corresponding, and highly precise, m/z. In this manner, SNPs can be identified based on the slight differences in mass, and the corresponding time of flight differences, inherent in nucleic acid molecules having different nucleotides at a single base position. For further information regarding the use of primer extension assays in conjunction with MALDI-TOF mass spectrometry for SNP genotyping, see, e.g., Wise et al., “A standard protocol for single nucleotide primer extension in the human genome using matrix-assisted laser desorption/ionization time-of-flight mass spectrometry,” Rapid Commun Mass Spectrom 17(11):1195-202 (2003).

[0217] The following references provide further information describing mass spectrometry-based methods for SNP genotyping: Bocker, “SNP and mutation discovery using base-specific cleavage and MALDI-TOF mass spectrometry,” Bioinformatics 19 Suppl 1:144-153 (July 2003); Storm et al., “MALDI-TOF mass spectrometry-based SNP genotyping,” Methods Mol Biol 212:241-62 (2003); Jurinke et al., “The use of Mass ARRAY technology for high throughput genotyping,” Adv Biochem Eng Biotechnol 77:57-74 (2002); and Jurinke et al., “Automated genotyping using the DNA MassArray technology,” Methods Mol Biol 187:179-92 (2002).

[0218] SNPs can also be scored by direct DNA sequencing. A variety of automated sequencing procedures can be utilized (e.g. Biotechniques 19:448 (1995)), including sequencing by mass spectrometry. See, e.g. PCT International Publication No. WO 94/16101; Cohen et al., Adv Chromatogr 36:127-162 (1996); and Griffin et al., Appl Biochem Biotechnol 38:147-159 (1993). The nucleic acid sequences of the present invention enable one of ordinary skill in the art to readily design sequencing primers for such automated sequencing procedures. Commercial instrumentation, such as the Applied Biosystems 377, 3100, 3700, 3730, and 3730×l DNA Analyzers (Foster City, Calif.), is commonly used in the art for automated sequencing.

[0219] Other methods that can be used to genotype the SNPs of the present invention include single-strand conformational polymorphism (SSCP), and denaturing gradient gel electrophoresis (DGGE). Myers et al., Nature 313:495 (1985). SSCP identifies base differences by alteration in electrophoretic migration of single stranded PCR products, as described in Orita et al., Proc. Nat. Acad. Single-stranded PCR products can be generated by heating or otherwise denaturing double stranded PCR products. Single-stranded nucleic acids may refold or form secondary structures that are partially dependent on the base sequence. The different electrophoretic mobilities of single-stranded amplification products are related to base-sequence differences at SNP positions. DGGE differentiates SNP alleles based on the different sequence-dependent stabilities and melting properties inherent in polymorphic DNA and the corresponding differences in electrophoretic migration patterns in a denaturing gradient gel. PCR Technology: Principles and Applications for DNA Amplification Chapter 7, Erlich, ed., W.H. Freeman and Co, N.Y. (1992).

[0220] Sequence-specific ribozymes (U.S. Pat. No. 5,498,531) can also be used to score SNPs based on the development or loss of a ribozyme cleavage site. Perfectly matched sequences can be distinguished from mismatched sequences by nuclease cleavage digestion assays or by differences in melting temperature. If the SNP affects a restriction enzyme cleavage site, the SNP can be identified by alterations in restriction enzyme digestion patterns, and the corresponding changes in nucleic acid fragment lengths determined by gel electrophoresis.

[0221] SNP genotyping can include the steps of, for example, collecting a biological sample from a human subject (e.g., sample of tissues, cells, fluids, secretions, etc.), isolating nucleic acids (e.g., genomic DNA, mRNA or both) from the cells of the sample, contacting the nucleic acids with one or more primers which specifically hybridize to a region of the isolated nucleic acid containing a target SNP under conditions such that hybridization and amplification of the target nucleic acid region occurs, and determining the nucleotide present at the SNP position of interest, or, in some assays, detecting the presence or absence of an amplification product (assays can be designed so that hybridization and/or amplification will only occur if a particular SNP allele is present or absent). In some assays, the size of the amplification product is detected and compared to the length of a control sample; for example, deletions and insertions can be detected by a change in size of the amplified product compared to a normal genotype.

[0222] SNP genotyping is useful for numerous practical applications, as described below. Examples of such applications include, but are not limited to, SNP-disease association analysis, disease predisposition screening, disease diagnosis, disease prognosis, disease progression monitoring, determining therapeutic strategies based on an individual's genotype (“pharmacogenomics”), developing therapeutic agents based on SNP genotypes associated with a disease or likelihood of responding to a drug, stratifying a patient population for clinical trial for a treatment regimen, predicting the likelihood that an individual will experience toxic side effects from a therapeutic agent, and human identification applications such as forensics.

[0223] Analysis of Genetic Association Between SNPs and Phenotypic Traits

[0224] SNP genotyping for disease diagnosis, disease predisposition screening, disease prognosis, determining drug responsiveness (pharmacogenomics), drug toxicity screening, and other uses described herein, typically relies on initially establishing a genetic association between one or more specific SNPs and the particular phenotypic traits of interest.

[0225] Different study designs may be used for genetic association studies. Modern Epidemiology 609-622, Lippincott, Williams & Wilkins (1998). Observational studies are most frequently carried out in which the response of the patients is not interfered with. The first type of observational study identifies a sample of persons in whom the suspected cause of the disease is present and another sample of persons in whom the suspected cause is absent, and then the frequency of development of disease in the two samples is compared. These sampled populations are called cohorts, and the study is a prospective study. The other type of observational study is case-control or a retrospective study. In typical case-control studies, samples are collected from individuals with the phenotype of interest (cases) such as certain manifestations of a disease, and from individuals without the phenotype (controls) in a population (target population) that conclusions are to be drawn from. Then the possible causes of the disease are investigated retrospectively. As the time and costs of collecting samples in case-control studies are considerably less than those for prospective studies, case-control studies are the more commonly used study design in genetic association studies, at least during the exploration and discovery stage.

[0226] In both types of observational studies, there may be potential confounding factors that should be taken into consideration. Confounding factors are those that are associated with both the real cause(s) of the disease and the disease itself, and they include demographic information such as age, gender, ethnicity as well as environmental factors. When confounding factors are not matched in cases and controls in a study, and are not controlled properly, spurious association results can arise. If potential confounding factors are identified, they should be controlled for by analysis methods explained below.

[0227] In a genetic association study, the cause of interest to be tested is a certain allele or a SNP or a combination of alleles or a haplotype from several SNPs. Thus, tissue specimens (e.g., whole blood) from the sampled individuals may be collected and genomic DNA genotyped for the SNP(s) of interest. In addition to the phenotypic trait of interest, other information such as demographic (e.g., age, gender, ethnicity, etc.), clinical, and environmental information that may influence the outcome of the trait can be collected to further characterize and define the sample set. In many cases, these factors are known to be associated with diseases and/or SNP allele frequencies. There are likely gene-environment and/or gene-gene interactions as well. Analysis methods to address gene-environment and gene-gene interactions (for example, the effects of the presence of both susceptibility alleles at two different genes can be greater than the effects of the individual alleles at two genes combined) are discussed below.

[0228] After all the relevant phenotypic and genotypic information has been obtained, statistical analyses are carried out to determine if there is any significant correlation between the presence of an allele or a genotype with the phenotypic characteristics of an individual. Preferably, data inspection and cleaning are first performed before carrying out statistical tests for genetic association. Epidemiological and clinical data of the samples can be summarized by descriptive statistics with tables and graphs. Data validation is preferably performed to check for data completion, inconsistent entries, and outliers. Chi-squared tests and t-tests (Wilcoxon rank-sum tests if distributions are not normal) may then be used to check for significant differences between cases and controls for discrete and continuous variables, respectively. To ensure genotyping quality, Hardy-Weinberg disequilibrium tests can be performed on cases and controls separately. Significant deviation from Hardy-Weinberg equilibrium (HWE) in both cases and controls for individual markers can be indicative of genotyping errors. If HWE is violated in a majority of markers, it is indicative of population substructure that should be further investigated. Moreover, Hardy-Weinberg disequilibrium in cases only can indicate genetic association of the markers with the disease. B. Weir, Genetic Data Analysis, Sinauer (1990).

[0229] To test whether an allele of a single SNP is associated with the case or control status of a phenotypic trait, one skilled in the art can compare allele frequencies in cases and controls. Standard chi-squared tests and Fisher exact tests can be carried out on a 2×2 table (2 SNP alleles×2 outcomes in the categorical trait of interest). To test whether genotypes of a SNP are associated, chi-squared tests can be carried out on a 3×2 table (3 genotypes×2 outcomes). Score tests are also carried out for genotypic association to contrast the three genotypic frequencies (major homozygotes, heterozygotes and minor homozygotes) in cases and controls, and to look for trends using 3 different modes of inheritance, namely dominant (with contrast coefficients 2, −1, −1), additive or allelic (with contrast coefficients 1, 0, −1) and recessive (with contrast coefficients 1, 1, −2). Odds ratios for minor versus major alleles, and odds ratios for heterozygote and homozygote variants versus the wild type genotypes are calculated with the desired confidence limits, usually 95%.

[0230] In order to control for confounders and to test for interaction and effect modifiers, stratified analyses may be performed using stratified factors that are likely to be confounding, including demographic information such as age, ethnicity, and gender, or an interacting element or effect modifier, such as a known major gene (e.g., APOE for Alzheimer's disease or HLA genes for autoimmune diseases), or environmental factors such as smoking in lung cancer. Stratified association tests may be carried out using Cochran-Mantel-Haenszel tests that take into account the ordinal nature of genotypes with 0, 1, and 2 variant alleles. Exact tests by StatXact may also be performed when computationally possible. Another way to adjust for confounding effects and test for interactions is to perform stepwise multiple logistic regression analysis using statistical packages such as SAS or R. Logistic regression is a model-building technique in which the best fitting and most parsimonious model is built to describe the relation between the dichotomous outcome (for instance, getting a certain disease or not) and a set of independent variables (for instance, genotypes of different associated genes, and the associated demographic and environmental factors). The most common model is one in which the logit transformation of the odds ratios is expressed as a linear combination of the variables (main effects) and their cross-product terms (interactions). Hosmer and Lemeshow, Applied Logistic Regression, Wiley (2000). To test whether a certain variable or interaction is significantly associated with the outcome, coefficients in the model are first estimated and then tested for statistical significance of their departure from zero.

[0231] In addition to performing association tests one marker at a time, haplotype association analysis may also be performed to study a number of markers that are closely linked together. Haplotype association tests can have better power than genotypic or allelic association tests when the tested markers are not the disease-causing mutations themselves but are in linkage disequilibrium with such mutations. The test will even be more powerful if the disease is indeed caused by a combination of alleles on a haplotype (e.g., APOE is a haplotype formed by 2 SNPs that are very close to each other). In order to perform haplotype association effectively, marker-marker linkage disequilibrium measures, both D′ and r², are typically calculated for the markers within a gene to elucidate the haplotype structure. Recent studies in linkage disequilibrium indicate that SNPs within a gene are organized in block pattern, and a high degree of linkage disequilibrium exists within blocks and very little linkage disequilibrium exists between blocks. Daly et al, Nature Genetics 29:232-235 (2001). Haplotype association with the disease status can be performed using such blocks once they have been elucidated.

[0232] Haplotype association tests can be carried out in a similar fashion as the allelic and genotypic association tests. Each haplotype in a gene is analogous to an allele in a multi-allelic marker. One skilled in the art can either compare the haplotype frequencies in cases and controls or test genetic association with different pairs of haplotypes. It has been proposed that score tests can be done on haplotypes using the program “haplo.score.” Schaid et al, Am J Hum Genet. 70:425-434 (2002). In that method, haplotypes are first inferred by EM algorithm and score tests are carried out with a generalized linear model (GLM) framework that allows the adjustment of other factors.

[0233] An important decision in the performance of genetic association tests is the determination of the significance level at which significant association can be declared when the P value of the tests reaches that level. In an exploratory analysis where positive hits will be followed up in subsequent confirmatory testing, an unadjusted P value<0.2 (a significance level on the lenient side), for example, may be used for generating hypotheses for significant association of a SNP with certain phenotypic characteristics of a disease. It is preferred that a p-value<0.05 (a significance level traditionally used in the art) is achieved in order for a SNP to be considered to have an association with a disease. It is more preferred that a p-value<0.01 (a significance level on the stringent side) is achieved for an association to be declared. When hits are followed up in confirmatory analyses in more samples of the same source or in different samples from different sources, adjustment for multiple testing will be performed as to avoid excess number of hits while maintaining the experiment-wide error rates at 0.05. While there are different methods to adjust for multiple testing to control for different kinds of error rates, a commonly used but rather conservative method is Bonferroni correction to control the experiment-wise or family-wise error rate. Westfall et al., Multiple comparisons and multiple tests, SAS Institute (1999). Permutation tests to control for the false discovery rates, FDR, can be more powerful. Benjamini and Hochberg, Journal of the Royal Statistical Society, Series B 57:1289-1300 (1995); Westfall and Young, Resampling-based Multiple Testing, Wiley (1993). Such methods to control for multiplicity would be preferred when the tests are dependent and controlling for false discovery rates is sufficient as opposed to controlling for the experiment-wise error rates.

[0234] In replication studies using samples from different populations after statistically significant markers have been identified in the exploratory stage, meta-analyses can then be performed by combining evidence of different studies. Modern Epidemiology 643-673, Lippincott, Williams & Wilkins (1998). If available, association results known in the art for the same SNPs can be included in the meta-analyses.

[0235] Since both genotyping and disease status classification can involve errors, sensitivity analyses may be performed to see how odds ratios and p-values would change upon various estimates on genotyping and disease classification error rates.

[0236] It has been well known that subpopulation-based sampling bias between cases and controls can lead to spurious results in case-control association studies when prevalence of the disease is associated with different subpopulation groups. Ewens and Spielman, Am J Hum Genet. 62:450-458 (1995). Such bias can also lead to a loss of statistical power in genetic association studies. To detect population stratification, Pritchard and Rosenberg suggested typing markers that are unlinked to the disease and using results of association tests on those markers to determine whether there is any population stratification. Pritchard et al., Am J Hum Gen 65:220-228 (1999). When stratification is detected, the genomic control (GC) method as proposed by Devlin and Roeder can be used to adjust for the inflation of test statistics due to population stratification. Devlin et al., Biometrics 55:997-1004 (1999). The GC method is robust to changes in population structure levels as well as being applicable to DNA pooling designs. Devlin et al., Genet Epidem 21:273-284 (2001).

[0237] While Pritchard's method recommended using 15-20 unlinked microsatellite markers, it suggested using more than 30 biallelic markers to get enough power to detect population stratification. For the GC method, it has been shown that about 60-70 biallelic markers are sufficient to estimate the inflation factor for the test statistics due to population stratification. Bacanu et al., Am J Hum Genet. 66:1933-1944 (2000). Hence, 70 intergenic SNPs can be chosen in unlinked regions as indicated in a genome scan. Kehoe et al., Hum Mol Genet. 8:237-245 (1999).

[0238] Once individual risk factors, genetic or non-genetic, have been found for the predisposition to disease, the next step is to set up a classification/prediction scheme to predict the category (for instance, disease or no-disease) that an individual will be in depending on his genotypes of associated SNPs and other non-genetic risk factors. Logistic regression for discrete trait and linear regression for continuous trait are standard techniques for such tasks. Draper and Smith, Applied Regression Analysis, Wiley (1998). Moreover, other techniques can also be used for setting up classification. Such techniques include, but are not limited to, MART, CART, neural network, and discriminant analyses that are suitable for use in comparing the performance of different methods. The Elements of Statistical Learning, Hastie, Tibshirani & Friedman, Springer (2002).

[0239] Disease Diagnosis and Predisposition Screening

[0240] Information on association/correlation between genotypes and disease-related phenotypes can be exploited in several ways. For example, in the case of a highly statistically significant association between one or more SNPs with predisposition to a disease for which treatment is available, detection of such a genotype pattern in an individual may justify immediate administration of treatment, or at least the institution of regular monitoring of the individual. Detection of the susceptibility alleles associated with serious disease in a couple contemplating having children may also be valuable to the couple in their reproductive decisions. In the case of a weaker but still statistically significant association between a SNP and a human disease, immediate therapeutic intervention or monitoring may not be justified after detecting the susceptibility allele or SNP. Nevertheless, the subject can be motivated to begin simple life-style changes (e.g., diet, exercise) that can be accomplished at little or no cost to the individual but would confer potential benefits in reducing the risk of developing conditions for which that individual may have an increased risk by virtue of having the risk allele(s).

[0241] The SNPs of the invention may contribute to the development of CHD in an individual in different ways. Some polymorphisms occur within a protein coding sequence and contribute to disease phenotype by affecting protein structure. Other polymorphisms occur in noncoding regions but may exert phenotypic effects indirectly via influence on, for example, replication, transcription, and/or translation. A single SNP may affect more than one phenotypic trait. Likewise, a single phenotypic trait may be affected by multiple SNPs in different genes.

[0242] As used herein, the terms “diagnose,” “diagnosis,” and “diagnostics” include, but are not limited to any of the following: detection of CHD such as MI that an individual may presently have, predisposition/susceptibility screening (i.e., determining the increased risk of an individual in developing MI in the future, or determining whether an individual has a decreased risk of developing CHD in the future), determining a particular type or subclass of CHD in an individual known to have CHD, confirming or reinforcing a previously made diagnosis of CHD, pharmacogenomic evaluation of an individual to determine which therapeutic strategy that individual is most likely to positively respond to or to predict whether a patient is likely to respond to a particular treatment such as statins, predicting whether a patient is likely to experience toxic effects from a particular treatment or therapeutic compound, and evaluating the future prognosis of an individual having CHD. Such diagnostic uses are based on the SNPs individually or in a unique combination or SNP haplotypes of the present invention.

[0243] Haplotypes are particularly useful in that, for example, fewer SNPs can be genotyped to determine if a particular genomic region harbors a locus that influences a particular phenotype, such as in linkage disequilibrium-based SNP association analysis.

[0244] Linkage disequilibrium (LD) refers to the co-inheritance of alleles (e.g., alternative nucleotides) at two or more different SNP sites at frequencies greater than would be expected from the separate frequencies of occurrence of each allele in a given population. The expected frequency of co-occurrence of two alleles that are inherited independently is the frequency of the first allele multiplied by the frequency of the second allele. Alleles that co-occur at expected frequencies are said to be in “linkage equilibrium.” In contrast, LD refers to any non-random genetic association between allele(s) at two or more different SNP sites, which is generally due to the physical proximity of the two loci along a chromosome. LD can occur when two or more SNPs sites are in close physical proximity to each other on a given chromosome and therefore alleles at these SNP sites will tend to remain unseparated for multiple generations with the consequence that a particular nucleotide (allele) at one SNP site will show a non-random association with a particular nucleotide (allele) at a different SNP site located nearby. Hence, genotyping one of the SNP sites will give almost the same information as genotyping the other SNP site that is in LD.

[0245] Various degrees of LD can be encountered between two or more SNPs with the result being that some SNPs are more closely associated (i.e., in stronger LD) than others. Furthermore, the physical distance over which LD extends along a chromosome differs between different regions of the genome, and therefore the degree of physical separation between two or more SNP sites necessary for LD to occur can differ between different regions of the genome.

[0246] For diagnostic purposes and similar uses, if a particular SNP site is found to be useful for diagnosing CHD (e.g., has a significant statistical association with the condition and/or is recognized as a causative polymorphism for the condition), then the skilled artisan would recognize that other SNP sites which are in LD with this SNP site would also be useful for diagnosing the condition. Thus, polymorphisms (e.g., SNPs and/or haplotypes) that are not the actual disease-causing (causative) polymorphisms, but are in LD with such causative polymorphisms, are also useful. In such instances, the genotype of the polymorphism(s) that is/are in LD with the causative polymorphism is predictive of the genotype of the causative polymorphism and, consequently, predictive of the phenotype (e.g., CHD) that is influenced by the causative SNP(s). Therefore, polymorphic markers that are in LD with causative polymorphisms are useful as diagnostic markers, and are particularly useful when the actual causative polymorphism(s) is/are unknown.

[0247] Examples of polymorphisms that can be in LD with one or more causative polymorphisms (and/or in LD with one or more polymorphisms that have a significant statistical association with a condition) and therefore useful for diagnosing the same condition that the causative/associated SNP(s) is used to diagnose, include other SNPs in the same gene, protein-coding, or mRNA transcript-coding region as the causative/associated SNP, other SNPs in the same exon or same intron as the causative/associated SNP, other SNPs in the same haplotype block as the causative/associated SNP, other SNPs in the same intergenic region as the causative/associated SNP, SNPs that are outside but near a gene (e.g., within 6 kb on either side, 5′ or 3′, of a gene boundary) that harbors a causative/associated SNP, etc. Such useful LD SNPs can be selected from among the SNPs disclosed in Tables 1 and 2, for example.

[0248] Linkage disequilibrium in the human genome is reviewed in Wall et al., “Haplotype blocks and linkage disequilibrium in the human genome,” Nat Rev Genet. 4(8):587-97 (August 2003); Garner et al., “On selecting markers for association studies: patterns of linkage disequilibrium between two and three diallelic loci,” Genet Epidemiol 24(1):57-67 (January 2003); Ardlie et al., “Patterns of linkage disequilibrium in the human genome,” Nat Rev Genet. 3(4):299-309 (April 2002); erratum in Nat Rev Genet. 3(7):566 (July 2002); and Remm et al., “High-density genotyping and linkage disequilibrium in the human genome using chromosome 22 as a model,” Curr Opin Chem Biol 6(1):24-30 (February 2002); J. B. S. Haldane, “The combination of linkage values, and the calculation of distances between the loci of linked factors,” J Genet. 8:299-309 (1919); G. Mendel, Versuche über Pflanzen-Hybriden. Verhandlungen des naturforschenden Vereines in Brünn (Proceedings of the Natural History Society of Brünn) (1866); Genes IV, B. Lewin, ed., Oxford University Press, N.Y. (1990); D. L. Hartl and A. G. Clark Principles of Population Genetics 2^{nd} ed., Sinauer Associates, Inc., Mass. (1989); J. H. Gillespie Population Genetics: A Concise Guide. 2^{nd} ed, Johns Hopkins University Press (2004); R. C. Lewontin, “The interaction of selection and linkage. I. General considerations; heterotic models,” Genetics 49:49-67 (1964); P. G. Hoel, Introduction to Mathematical Statistics 2^{nd} ed., John Wiley & Sons, Inc., N.Y. (1954); R.R. Hudson, “Two-locus sampling distributions and their application,” Genetics 159:1805-1817 (2001); A. P. Dempster, N. M. Laird, D. B. Rubin, “Maximum likelihood from incomplete data via the EM algorithm,” J R Stat Soc 39:1-38 (1977); L. Excoffier, M. Slatkin, “Maximum-likelihood estimation of molecular haplotype frequencies in a diploid population,” Mol Biol Evol 12(5):921-927 (1995); D. A. Tregouet, S. Escolano, L. Tiret, A. Mallet, J. L. Golmard, “A new algorithm for haplotype-based association analysis: the Stochastic-EM algorithm,” Ann Hum Genet. 68(Pt 2):165-177 (2004); A. D. Long and C. H. Langley C H, “The power of association studies to detect the contribution of candidate genetic loci to variation in complex traits,” Genome Research 9:720-731 (1999); A. Agresti, Categorical Data Analysis, John Wiley & Sons, Inc., N.Y. (1990); K. Lange, Mathematical and Statistical Methods for Genetic Analysis, Springer-Verlag New York, Inc., N.Y. (1997); The International HapMap Consortium, “The International HapMap Project,” Nature 426:789-796 (2003); The International HapMap Consortium, “A haplotype map of the human genome,” Nature 437:1299-1320 (2005); G. A. Thorisson, A. V. Smith, L. Krishnan, L. D. Stein, “The International HapMap Project Web Site,” Genome Research 15:1591-1593 (2005); G. McVean, C. C. A. Spencer, R. Chaix, “Perspectives on human genetic variation from the HapMap project,” PLoS Genetics 1(4):413-418 (2005); J. N. Hirschhorn, M. J. Daly, “Genome-wide association studies for common diseases and complex traits,” Nat Genet. 6:95-108 (2005); S. J. Schrodi, “A probabilistic approach to large-scale association scans: a semi-Bayesian method to detect disease-predisposing alleles,” SAGMB 4(1):31 (2005); W. Y. S. Wang, B. J. Barratt, D. G. Clayton, J. A. Todd, “Genome-wide association studies: theoretical and practical concerns,” Nat Rev Genet. 6:109-118 (2005); J. K. Pritchard, M. Przeworski, “Linkage disequilibrium in humans: models and data,” Am J Hum Genet. 69:1-14 (2001).

[0249] As discussed above, one aspect of the present invention is the discovery that SNPs which are in certain LD distance with the interrogated SNP can also be used as valid markers for identifying an increased or decreased risks of having or developing CHD. As used herein, the term “interrogated SNP” refers to SNPs that have been found to be associated with an increased or decreased risk of disease using genotyping results and analysis, or other appropriate experimental method as exemplified in the working examples described in this application. As used herein, the term “LD SNP” refers to a SNP that has been characterized as a SNP associating with an increased or decreased risk of diseases due to their being in LD with the “interrogated SNP” under the methods of calculation described in the application. Below, applicants describe the methods of calculation with which one of ordinary skilled in the art may determine if a particular SNP is in LD with an interrogated SNP. The parameter r² is commonly used in the genetics art to characterize the extent of linkage disequilibrium between markers (Hudson, 2001). As used herein, the term “in LD with” refers to a particular SNP that is measured at above the threshold of a parameter such as r² with an interrogated SNP.

[0250] It is now common place to directly observe genetic variants in a sample of chromosomes obtained from a population. Suppose one has genotype data at two genetic markers located on the same chromosome, for the markers A and B. Further suppose that two alleles segregate at each of these two markers such that alleles A₁ and A₂ can be found at marker A and alleles B₁ and B₂ at marker B. Also assume that these two markers are on a human autosome. If one is to examine a specific individual and find that they are heterozygous at both markers, such that their two-marker genotype is A₁A₂B₁B₂ then there are two possible configurations: the individual in question could have the alleles A₁B₁ on one chromosome and A₂B₂ on the remaining chromosome; alternatively, the individual could have alleles A₁B₂ on one chromosome and A₂B₁ on the other. The arrangement of alleles on a chromosome is called a haplotype. In this illustration, the individual could have haplotypes A₁B₁/A₂B₂ or A₁B₂/A₂B₁ (see Hartl and Clark (1989) for a more complete description). The concept of linkage equilibrium relates the frequency of haplotypes to the allele frequencies.

[0251] Assume that a sample of individuals is selected from a larger population. Considering the two markers described above, each having two alleles, there are four possible haplotypes: A₁B₁, A₁B₂, A₂B₁ and A₂B₂. Denote the frequencies of these four haplotypes with the following notation.

P₁₁=freq(A₁B₁) (1)

P₁₂=freq(A₁B₂) (2)

P₂₁=freq(A₂B₁) (3)

P₂₂=freq(A₂B₂) (4)

[0252] The allele frequencies at the two markers are then the sum of different haplotype frequencies, it is straightforward to write down a similar set of equations relating single-marker allele frequencies to two-marker haplotype frequencies:

p₁=freq(A₁)=P₁₁+P₁₂ (5)

p₂=freq(A₂)=P₂₁+P₂₂ (6)

q₁=freq(B₁)=P₁₁+P₂₁ (7)

q₂=freq(B₂)=P₁₂+P₂₂ (8)

[0253] Note that the four haplotype frequencies and the allele frequencies at each marker must sum to a frequency of 1.

P₁₁+P₁₂+P₂₁+P₂₂=1 (9)

p₁+p₂ (10)

q₁+q₂=1 (11)

[0254] If there is no correlation between the alleles at the two markers, one would expect that the frequency of the haplotypes would be approximately the product of the composite alleles. Therefore,

P₁₁˜p₁q₁ (12)

P₁₂˜p₁q₂ (13)

P₂₁˜p₂q₁ (14)

P₂₂˜p₂q₂ (15)

These approximating equations (12)-(15) represent the concept of linkage equilibrium where there is independent assortment between the two markers—the alleles at the two markers occur together at random. These are represented as approximations because linkage equilibrium and linkage disequilibrium are concepts typically thought of as properties of a sample of chromosomes; and as such they are susceptible to stochastic fluctuations due to the sampling process. Empirically, many pairs of genetic markers will be in linkage equilibrium, but certainly not all pairs.

[0255] Having established the concept of linkage equilibrium above, applicants can now describe the concept of linkage disequilibrium (LD), which is the deviation from linkage equilibrium. Since the frequency of the A₁B₁ haplotype is approximately the product of the allele frequencies for A₁ and B₁ under the assumption of linkage equilibrium as stated mathematically in (12), a simple measure for the amount of departure from linkage equilibrium is the difference in these two quantities, D,

D=P₁₁−p₁q₁ (16)

D=0 indicates perfect linkage equilibrium. Substantial departures from D=0 indicates LD in the sample of chromosomes examined. Many properties of D are discussed in Lewontin (1964) including the maximum and minimum values that D can take. Mathematically, using basic algebra, it can be shown that D can also be written solely in terms of haplotypes:

D=P₁₁P₂₂−P₁₂P₂₁ (17)

If one transforms D by squaring it and subsequently dividing by the product of the allele frequencies of A₁, A₂, B₁ and B₂, the resulting quantity, called r², is equivalent to the square of the Pearson's correlation coefficient commonly used in statistics (e.g. Hoel, 1954).

$${r}^{2} = \frac{{D}^{2}}{{p}_{1} {p}_{2} {q}_{1} {q}_{2}} \qquad ( 18 )$$

[0256] As with D, values of r² close to 0 indicate linkage equilibrium between the two markers examined in the sample set. As values of r² increase, the two markers are said to be in linkage disequilibrium. The range of values that r² can take are from 0 to 1. r²=1 when there is a perfect correlation between the alleles at the two markers.

[0257] In addition, the quantities discussed above are sample-specific. And as such, it is necessary to formulate notation specific to the samples studied. In the approach discussed here, three types of samples are of primary interest: (i) a sample of chromosomes from individuals affected by a disease-related phenotype (cases), (ii) a sample of chromosomes obtained from individuals not affected by the disease-related phenotype (controls), and (iii) a standard sample set used for the construction of haplotypes and calculation pairwise linkage disequilibrium. For the allele frequencies used in the development of the method described below, an additional subscript will be added to denote either the case or control sample sets.

p_{1,cs}=freq(A₁ in cases) (19)

p_{2,cs}=freq(A₂ in cases) (20)

q_{1,cs}=freq(B₁ in cases) (21)

q_{2,cs}=freq(B₂ in cases) (22)

Similarly,

p_{1,ct}=freq(A₁ in controls) (23)

p_{2,ct}=freq(A₂ in controls) (24)

q_{1,ct}=freq(B₁ in controls) (25)

q_{2,ct}=freq(B₂ in controls) (26)

[0258] As a well-accepted sample set is necessary for robust linkage disequilibrium calculations, data obtained from the International HapMap project (The International HapMap Consortium 2003, 2005; Thorisson et al, 2005; McVean et al, 2005) can be used for the calculation of pairwise r² values. Indeed, the samples genotyped for the International HapMap Project were selected to be representative examples from various human sub-populations with sufficient numbers of chromosomes examined to draw meaningful and robust conclusions from the patterns of genetic variation observed. The International HapMap project website (hapmap.org) contains a description of the project, methods utilized and samples examined. It is useful to examine empirical data to get a sense of the patterns present in such data.

[0259] Haplotype frequencies were explicit arguments in equation (18) above. However, knowing the 2-marker haplotype frequencies requires that phase to be determined for doubly heterozygous samples. When phase is unknown in the data examined, various algorithms can be used to infer phase from the genotype data. This issue was discussed earlier where the doubly heterozygous individual with a 2-SNP genotype of A₁A₂B₁B₂ could have one of two different sets of chromosomes: A₁B₁|A₂B₂ or A₁B₂|A₂B₁. One such algorithm to estimate haplotype frequencies is the expectation-maximization (EM) algorithm first formalized by Dempster et al. (1977). This algorithm is often used in genetics to infer haplotype frequencies from genotype data (e.g. Excoffier and Slatkin (1995); Tregouet et al. (2004)). It should be noted that for the two-SNP case explored here, EM algorithms have very little error provided that the allele frequencies and sample sizes are not too small. The impact on r² values is typically negligible.

[0260] As correlated genetic markers share information, interrogation of SNP markers in LD with a disease-associated SNP marker can also have sufficient power to detect disease association (Long and Langley (1999)). The relationship between the power to directly find disease-associated alleles and the power to indirectly detect disease-association was investigated by Pritchard and Przeworski (2001). In a straight-forward derivation, it can be shown that the power to detect disease association indirectly at a marker locus in linkage disequilibrium with a disease-association locus is approximately the same as the power to detect disease-association directly at the disease-association locus if the sample size is increased by a factor of

$$\frac{1}{{r}^{2}}$$

(the reciprocal of equation 18) at the marker in comparison with the disease-association locus.

[0261] Therefore, if one calculated the power to detect disease-association indirectly with an experiment having N samples, then equivalent power to directly detect disease-association (at the actual disease-susceptibility locus) would necessitate an experiment using approximately r²N samples. This elementary relationship between power, sample size and linkage disequilibrium can be used to derive an r² threshold value useful in determining whether or not genotyping markers in linkage disequilibrium with a SNP marker directly associated with disease status has enough power to indirectly detect disease-association.

[0262] To commence a derivation of the power to detect disease-associated markers through an indirect process, define the effective chromosomal sample size as

$$n = \frac{4 {N}_{cs} {N}_{ct}}{{N}_{cs} + {N}_{ct}} ; \qquad ( 27 )$$

where N_{cs} and N_{ct} are the numbers of diploid cases and controls, respectively. This is necessary to handle situations where the numbers of cases and controls are not equivalent. For equal case and control sample sizes, N_{cs}=N_{ct}=N, the value of the effective number of chromosomes is simply n=2N—as expected. Let power be calculated for a significance level α (such that traditional P-values below α will be deemed statistically significant). Define the standard Gaussian distribution function as Φ(). Mathematically,

$$Φ ( x ) = \frac{1}{\sqrt{2 π}} {\int }_{- ∞}^{x} {e}^{- \frac{{θ}^{2}}{2}} d θ \qquad ( 28 )$$

Alternatively, the following error function notation (Erf) may also be used,

$$Φ ( x ) = \frac{1}{2} [ 1 + Erf ( \frac{x}{\sqrt{2}} ) ] \qquad ( 29 )$$

[0263] For example, Φ(1.644854)=0.95. The value of r² may be derived to yield a pre-specified minimum amount of power to detect disease association though indirect interrogation. Noting that the LD SNP marker could be the one that is carrying the disease-association allele, therefore that this approach constitutes a lower-bound model where all indirect power results are expected to be at least as large as those interrogated.

[0264] Denote by β the error rate for not detecting truly disease-associated markers. Therefore, 1-β is the classical definition of statistical power. Substituting the Pritchard-Pzreworski result into the sample size, the power to detect disease association at a significance level of α is given by the approximation

$$1 - β ≅ Φ [ \frac{\vert {q}_{1 , cs} - {q}_{1 , ct} \vert}{\sqrt{\frac{{q}_{1 , cs} ( 1 - {q}_{1 , cs} ) + {q}_{1 , ct} ( 1 - {q}_{1 , ct} )}{{r}^{2} n}}} - {Z}_{1 - α / 2} ] ; \qquad ( 30 )$$

where Zᵤ is the inverse of the standard normal cumulative distribution evaluated at u(uε(0,1)). Zᵤ=Φ⁻²(u), where Φ(Φ⁻¹(u))=Φ⁻¹(Φ(u))=u. For example, setting α=0.05, and therefore 1−α/2=0.975, we obtain Z_{0.975}=1.95996. Next, setting power equal to a threshold of a minimum power of T,

$$T = Φ [ \frac{\vert {q}_{1 , cs} - {q}_{1 , ct} \vert}{\sqrt{\frac{{q}_{1 , cs} ( 1 - {q}_{1 , cs} ) + {q}_{1 , ct} ( 1 - {q}_{1 , ct} )}{{r}^{2} n}}} - {Z}_{1 - α / 2} ] \qquad ( 31 )$$

and solving for r², the following threshold r² is obtained:

$${r}_{T}^{2} = {\frac{⌊ {q}_{1 , cs} ( 1 - {q}_{1 , cs} ) + {q}_{1 , ct} ( 1 - {q}_{1 , ct} ) ⌋}{{n ( {q}_{1 , cs} - {q}_{1 , ct} )}^{2}} [ {Φ}^{- 1} ( T ) + {Z}_{1 - α / 2} ]}^{2} \qquad ( 32 )$$

### Or,

[0265]

$${r}_{T}^{2} = \frac{{( {Z}_{T} + {Z}_{1 - α / 2} )}^{2}}{n} [ \frac{{q}_{1 , cs} - {( {q}_{1 , cs} )}^{2} + {q}_{1 , ct} - {( {q}_{1 , ct} )}^{2}}{{( {q}_{1 , cs} - {q}_{1 , ct} )}^{2}} ] \qquad ( 33 )$$

[0266] Suppose that r² is calculated between an interrogated SNP and a number of other SNPs with varying levels of LD with the interrogated SNP. The threshold value r_{T}² is the minimum value of linkage disequilibrium between the interrogated SNP and the potential LD SNPs such that the LD SNP still retains a power greater or equal to T for detecting disease-association. For example, suppose that SNP rs200 is genotyped in a case-control disease-association study and it is found to be associated with a disease phenotype. Further suppose that the minor allele frequency in 1,000 case chromosomes was found to be 16% in contrast with a minor allele frequency of 10% in 1,000 control chromosomes. Given those measurements one could have predicted, prior to the experiment, that the power to detect disease association at a significance level of 0.05 was quite high—approximately 98% using a test of allelic association. Applying equation (32) one can calculate a minimum value of r² to indirectly assess disease association assuming that the minor allele at SNP rs200 is truly disease-predisposing for a threshold level of power. If one sets the threshold level of power to be 80%, then r_{T}²=0.489 given the same significance level and chromosome numbers as above. Hence, any SNP with a pairwise r² value with rs200 greater than 0.489 is expected to have greater than 80% power to detect the disease association. Further, this is assuming the conservative model where the LD SNP is disease-associated only through linkage disequilibrium with the interrogated SNP rs200.

[0267] The contribution or association of particular SNPs and/or SNP haplotypes with disease phenotypes, such as CHD, enables the SNPs of the present invention to be used to develop superior diagnostic tests capable of identifying individuals who express a detectable trait, such as CHD, as the result of a specific genotype, or individuals whose genotype places them at an increased or decreased risk of developing a detectable trait at a subsequent time as compared to individuals who do not have that genotype. As described herein, diagnostics may be based on a single SNP or a group of SNPs. Combined detection of a plurality of SNPs (for example, 2, 3, 4, 5, 6, 7, 8, 9, 10, 11, 12, 13, 14, 15, 16, 17, 18, 19, 20, 24, 25, 30, 32, 48, 50, 64, 96, 100, or any other number in-between, or more, of the SNPs provided in Table 1 and/or Table 2) typically increases the probability of an accurate diagnosis. For example, the presence of a single SNP known to correlate with CHD might indicate a probability of 20% that an individual has or is at risk of developing CHD, whereas detection of five SNPs, each of which correlates with CHD, might indicate a probability of 80% that an individual has or is at risk of developing CHD. To further increase the accuracy of diagnosis or predisposition screening, analysis of the SNPs of the present invention can be combined with that of other polymorphisms or other risk factors of CHD, such as disease symptoms, pathological characteristics, family history, diet, environmental factors or lifestyle factors.

[0268] It will, of course, be understood by practitioners skilled in the treatment or diagnosis of CHD that the present invention generally does not intend to provide an absolute identification of individuals who are at risk (or less at risk) of developing CHD, and/or pathologies related to CHD, but rather to indicate a certain increased (or decreased) degree or likelihood of developing the disease based on statistically significant association results. However, this information is extremely valuable as it can be used to, for example, initiate preventive treatments or to allow an individual carrying one or more significant SNPs or SNP haplotypes to foresee warning signs such as minor clinical symptoms, or to have regularly scheduled physical exams to monitor for appearance of a condition in order to identify and begin treatment of the condition at an early stage. Particularly with diseases that are extremely debilitating or fatal if not treated on time, the knowledge of a potential predisposition, even if this predisposition is not absolute, would likely contribute in a very significant manner to treatment efficacy.

[0269] The diagnostic techniques of the present invention may employ a variety of methodologies to determine whether a test subject has a SNP or a SNP pattern associated with an increased or decreased risk of developing a detectable trait or whether the individual suffers from a detectable trait as a result of a particular polymorphism/mutation, including, for example, methods which enable the analysis of individual chromosomes for haplotyping, family studies, single sperm DNA analysis, or somatic hybrids. The trait analyzed using the diagnostics of the invention may be any detectable trait that is commonly observed in pathologies and disorders related to MI.

[0270] Another aspect of the present invention relates to a method of determining whether an individual is at risk (or less at risk) of developing one or more traits or whether an individual expresses one or more traits as a consequence of possessing a particular trait-causing or trait-influencing allele. These methods generally involve obtaining a nucleic acid sample from an individual and assaying the nucleic acid sample to determine which nucleotide(s) is/are present at one or more SNP positions, wherein the assayed nucleotide(s) is/are indicative of an increased or decreased risk of developing the trait or indicative that the individual expresses the trait as a result of possessing a particular trait-causing or trait-influencing allele.

[0271] In another embodiment, the SNP detection reagents of the present invention are used to determine whether an individual has one or more SNP allele(s) affecting the level (e.g., the concentration of mRNA or protein in a sample, etc.) or pattern (e.g., the kinetics of expression, rate of decomposition, stability profile, Km, Vmax, etc.) of gene expression (collectively, the “gene response” of a cell or bodily fluid). Such a determination can be accomplished by screening for mRNA or protein expression (e.g., by using nucleic acid arrays, RT-PCR, TaqMan assays, or mass spectrometry), identifying genes having altered expression in an individual, genotyping SNPs disclosed in Table 1 and/or Table 2 that could affect the expression of the genes having altered expression (e.g., SNPs that are in and/or around the gene(s) having altered expression, SNPs in regulatory/control regions, SNPs in and/or around other genes that are involved in pathways that could affect the expression of the gene(s) having altered expression, or all SNPs could be genotyped), and correlating SNP genotypes with altered gene expression. In this manner, specific SNP alleles at particular SNP sites can be identified that affect gene expression.

[0272] Pharmacogenomics and Therapeutics/Drug Development

[0273] The present invention provides methods for assessing the pharmacogenomics of a subject harboring particular SNP alleles or haplotypes to a particular therapeutic agent or pharmaceutical compound, or to a class of such compounds. Pharmacogenomics deals with the roles which clinically significant hereditary variations (e.g., SNPs) play in the response to drugs due to altered drug disposition and/or abnormal action in affected persons. See, e.g., Roses, Nature 405, 857-865 (2000); Gould Rothberg, Nature Biotechnology 19, 209-211 (2001); Eichelbaum, Clin Exp Pharmacol Physiol 23(10-11):983-985 (1996); and Linder, Clin Chem 43(2):254-266 (1997). The clinical outcomes of these variations can result in severe toxicity of therapeutic drugs in certain individuals or therapeutic failure of drugs in certain individuals as a result of individual variation in metabolism. Thus, the SNP genotype of an individual can determine the way a therapeutic compound acts on the body or the way the body metabolizes the compound. For example, SNPs in drug metabolizing enzymes can affect the activity of these enzymes, which in turn can affect both the intensity and duration of drug action, as well as drug metabolism and clearance.

[0274] The discovery of SNPs in drug metabolizing enzymes, drug transporters, proteins for pharmaceutical agents, and other drug targets has explained why some patients do not obtain the expected drug effects, show an exaggerated drug effect, or experience serious toxicity from standard drug dosages. SNPs can be expressed in the phenotype of the extensive metabolizer and in the phenotype of the poor metabolizer. Accordingly, SNPs may lead to allelic variants of a protein in which one or more of the protein functions in one population are different from those in another population. SNPs and the encoded variant peptides thus provide targets to ascertain a genetic predisposition that can affect treatment modality. For example, in a ligand-based treatment, SNPs may give rise to amino terminal extracellular domains and/or other ligand-binding regions of a receptor that are more or less active in ligand binding, thereby affecting subsequent protein activation. Accordingly, ligand dosage would necessarily be modified to maximize the therapeutic effect within a given population containing particular SNP alleles or haplotypes.

[0275] As an alternative to genotyping, specific variant proteins containing variant amino acid sequences encoded by alternative SNP alleles could be identified. Thus, pharmacogenomic characterization of an individual permits the selection of effective compounds and effective dosages of such compounds for prophylactic or therapeutic uses based on the individual's SNP genotype, thereby enhancing and optimizing the effectiveness of the therapy. Furthermore, the production of recombinant cells and transgenic animals containing particular SNPs/haplotypes allow effective clinical design and testing of treatment compounds and dosage regimens. For example, transgenic animals can be produced that differ only in specific SNP alleles in a gene that is orthologous to a human disease susceptibility gene.

[0276] Pharmacogenomic uses of the SNPs of the present invention provide several significant advantages for patient care, particularly in treating MI. Pharmacogenomic characterization of an individual, based on an individual's SNP genotype, can identify those individuals unlikely to respond to treatment with a particular medication and thereby allows physicians to avoid prescribing the ineffective medication to those individuals. On the other hand, SNP genotyping of an individual may enable physicians to select the appropriate medication and dosage regimen that will be most effective based on an individual's SNP genotype. This information increases a physician's confidence in prescribing medications and motivates patients to comply with their drug regimens. Furthermore, pharmacogenomics may identify patients predisposed to toxicity and adverse reactions to particular drugs or drug dosages. Adverse drug reactions lead to more than 100,000 avoidable deaths per year in the United States alone and therefore represent a significant cause of hospitalization and death, as well as a significant economic burden on the healthcare system (Pfost et al., Trends in Biotechnology, August 2000.). Thus, pharmacogenomics based on the SNPs disclosed herein has the potential to both save lives and reduce healthcare costs substantially.

[0277] Pharmacogenomics in general is discussed further in Rose et al., “Pharmacogenetic analysis of clinically relevant genetic polymorphisms,” Methods Mol Med 85:225-37 (2003). Pharmacogenomics as it relates to Alzheimer's disease and other neurodegenerative disorders is discussed in Cacabelos, “Pharmacogenomics for the treatment of dementia,” Ann Med 34(5):357-79 (2002); Maimone et al., “Pharmacogenomics of neurodegenerative diseases,” Eur J Pharmacol 413(1): 11-29 (February 2001); and Poirier, “Apolipoprotein E: a pharmacogenetic target for the treatment of Alzheimer's disease,” Mol Diagn 4(4):335-41 (Dec. 1999). Pharmacogenomics as it relates to cardiovascular disorders is discussed in Siest et al., “Pharmacogenomics of drugs affecting the cardiovascular system,” Clin Chem Lab Med 41(4):590-9 (April 2003); Mukherjee et al., “Pharmacogenomics in cardiovascular diseases,” Prog Cardiovasc Dis 44(6):479-98 (May-June 2002); and Mooser et al., “Cardiovascular pharmacogenetics in the SNP era,” J Thromb Haemost 1(7): 1398-402 (July 2003). Pharmacogenomics as it relates to cancer is discussed in McLeod et al., “Cancer pharmacogenomics: SNPs, chips, and the individual patient,” Cancer Invest 21(4):630-40 (2003); and Watters et al., “Cancer pharmacogenomics: current and future applications,” Biochim Biophys Acta 1603(2):99-111 (March 2003).

[0278] The SNPs of the present invention also can be used to identify novel therapeutic targets for MI. For example, genes containing the disease-associated variants (“variant genes”) or their products, as well as genes or their products that are directly or indirectly regulated by or interacting with these variant genes or their products, can be targeted for the development of therapeutics that, for example, treat the disease or prevent or delay disease onset. The therapeutics may be composed of, for example, small molecules, proteins, protein fragments or peptides, antibodies, nucleic acids, or their derivatives or mimetics which modulate the functions or levels of the target genes or gene products.

[0279] The SNP-containing nucleic acid molecules disclosed herein, and their complementary nucleic acid molecules, may be used as antisense constructs to control gene expression in cells, tissues, and organisms. Antisense technology is well established in the art and extensively reviewed in Antisense Drug Technology: Principles, Strategies, and Applications, Crooke, ed., Marcel Dekker, Inc., N.Y. (2001). An antisense nucleic acid molecule is generally designed to be complementary to a region of mRNA expressed by a gene so that the antisense molecule hybridizes to the mRNA and thereby blocks translation of mRNA into protein. Various classes of antisense oligonucleotides are used in the art, two of which are cleavers and blockers. Cleavers, by binding to target RNAs, activate intracellular nucleases (e.g., RNaseH or RNase L) that cleave the target RNA. Blockers, which also bind to target RNAs, inhibit protein translation through steric hindrance of ribosomes. Exemplary blockers include peptide nucleic acids, morpholinos, locked nucleic acids, and methylphosphonates. See, e.g., Thompson, Drug Discovery Today 7(17): 912-917 (2002). Antisense oligonucleotides are directly useful as therapeutic agents, and are also useful for determining and validating gene function (e.g., in gene knock-out or knock-down experiments).

[0280] Antisense technology is further reviewed in: Lavery et al., “Antisense and RNAi: powerful tools in drug target discovery and validation,” Curr Opin Drug Discov Devel 6(4):561-9 (July 2003); Stephens et al., “Antisense oligonucleotide therapy in cancer,” Curr Opin Mol Ther 5(2): 118-22 (April 2003); Kurreck, “Antisense technologies. Improvement through novel chemical modifications,” Eur J Biochem 270(8): 1628-44 (April 2003); Dias et al, “Antisense oligonucleotides: basic concepts and mechanisms,” Mol Cancer Ther 1(5):347-55 (March 2002); Chen, “Clinical development of antisense oligonucleotides as anti-cancer therapeutics,” Methods Mol Med 75:621-36 (2003); Wang et al., “Antisense anticancer oligonucleotide therapeutics,” Curr Cancer Drug Targets 1(3): 177-96 (November 2001); and Bennett, “Efficiency of antisense oligonucleotide drug discovery,” Antisense Nucleic Acid Drug Dev 12(3):215-24 (June 2002).

[0281] The SNPs of the present invention are particularly useful for designing antisense reagents that are specific for particular nucleic acid variants. Based on the SNP information disclosed herein, antisense oligonucleotides can be produced that specifically target mRNA molecules that contain one or more particular SNP nucleotides. In this manner, expression of mRNA molecules that contain one or more undesired polymorphisms (e.g., SNP nucleotides that lead to a defective protein such as an amino acid substitution in a catalytic domain) can be inhibited or completely blocked. Thus, antisense oligonucleotides can be used to specifically bind a particular polymorphic form (e.g., a SNP allele that encodes a defective protein), thereby inhibiting translation of this form, but which do not bind an alternative polymorphic form (e.g., an alternative SNP nucleotide that encodes a protein having normal function).

[0282] Antisense molecules can be used to inactivate mRNA in order to inhibit gene expression and production of defective proteins. Accordingly, these molecules can be used to treat a disorder, such as MI, characterized by abnormal or undesired gene expression or expression of certain defective proteins. This technique can involve cleavage by means of ribozymes containing nucleotide sequences complementary to one or more regions in the mRNA that attenuate the ability of the mRNA to be translated. Possible mRNA regions include, for example, protein-coding regions and particularly protein-coding regions corresponding to catalytic activities, substrate/ligand binding, or other functional activities of a protein.

[0283] The SNPs of the present invention are also useful for designing RNA interference reagents that specifically target nucleic acid molecules having particular SNP variants. RNA interference (RNAi), also referred to as gene silencing, is based on using double-stranded RNA (dsRNA) molecules to turn genes off. When introduced into a cell, dsRNAs are processed by the cell into short fragments (generally about 21, 22, or 23 nucleotides in length) known as small interfering RNAs (siRNAs) which the cell uses in a sequence-specific manner to recognize and destroy complementary RNAs. Thompson, Drug Discovery Today 7(17): 912-917 (2002). Accordingly, an aspect of the present invention specifically contemplates isolated nucleic acid molecules that are about 18-26 nucleotides in length, preferably 19-25 nucleotides in length, and more preferably 20, 21, 22, or 23 nucleotides in length, and the use of these nucleic acid molecules for RNAi. Because RNAi molecules, including siRNAs, act in a sequence-specific manner, the SNPs of the present invention can be used to design RNAi reagents that recognize and destroy nucleic acid molecules having specific SNP alleles/nucleotides (such as deleterious alleles that lead to the production of defective proteins), while not affecting nucleic acid molecules having alternative SNP alleles (such as alleles that encode proteins having normal function). As with antisense reagents, RNAi reagents may be directly useful as therapeutic agents (e.g., for turning off defective, disease-causing genes), and are also useful for characterizing and validating gene function (e.g., in gene knock-out or knock-down experiments).

[0284] The following references provide a further review of RNAi: Reynolds et al., “Rational siRNA design for RNA interference,” Nat Biotechnol 22(3):326-30 (March 2004); Epub Feb. 1, 2004; Chi et al., “Genomewide view of gene silencing by small interfering RNAs,” PNAS 100(11):6343-6346 (2003); Vickers et al., “Efficient Reduction of Target RNAs by Small Interfering RNA and RNase H-dependent Antisense Agents,” J Biol Chem 278:7108-7118 (2003); Agami, “RNAi and related mechanisms and their potential use for therapy,” Curr Opin Chem Biol 6(6):829-34 (December 2002); Lavery et al., “Antisense and RNAi: powerful tools in drug target discovery and validation,” Curr Opin Drug Discov Devel 6(4):561-9 (July 2003); Shi, “Mammalian RNAi for the masses,” Trends Genet. 19(1):9-12 (January 2003); Shuey et al., “RNAi: gene-silencing in therapeutic intervention,” Drug Discovery Today 7(20):1040-1046 (October 2002); McManus et al., Nat Rev Genet 3(10):737-47 (October 2002); Xia et al., Nat Biotechnol 20(10):1006-10 (October 2002); Plasterk et al., Curr Opin Genet Dev 10(5):562-7 (October 2000); Bosher et al., Nat Cell Biol 2(2):E31-6 (February 2000); and Hunter, Curr Biol 17; 9(12):R440-2 (June 1999).

[0285] A subject suffering from a pathological condition ascribed to a SNP, for example MI, may be treated so as to correct the genetic defect. See Kren et al., Proc Natl Acad Sci USA 96:10349-10354 (1999). Such a subject can be identified by any method that can detect the polymorphism in a biological sample drawn from the subject. Such a genetic defect may be permanently corrected by administering to such a subject a nucleic acid fragment incorporating a repair sequence that supplies the normal/wild-type nucleotide at the position of the SNP. This site-specific repair sequence can encompass an RNA/DNA oligonucleotide that operates to promote endogenous repair of a subject's genomic DNA. The site-specific repair sequence is administered in an appropriate vehicle, such as a complex with polyethylenimine, encapsulated in anionic liposomes, a viral vector such as an adenovirus, or other pharmaceutical composition that promotes intracellular uptake of the administered nucleic acid. A genetic defect leading to an inborn pathology may then be overcome, as the chimeric oligonucleotides induce incorporation of the normal sequence into the subject's genome. Upon incorporation, the normal gene product is expressed, and the replacement is propagated, thereby engendering a permanent repair and therapeutic enhancement of the clinical condition of the subject.

[0286] In cases in which a cSNP results in a variant protein that is ascribed to be the cause of, or a contributing factor to, a pathological condition, a method of treating such a condition can include administering to a subject experiencing the pathology the wild-type/normal cognate of the variant protein. Once administered in an effective dosing regimen, the wild-type cognate provides complementation or remediation of the pathological condition.

[0287] The invention further provides a method for identifying a compound or agent that can be used to treat MI. The SNPs disclosed herein are useful as targets for the identification and/or development of therapeutic agents. A method for identifying a therapeutic agent or compound typically includes assaying the ability of the agent or compound to modulate the activity and/or expression of a SNP-containing nucleic acid or the encoded product and thus identifying an agent or a compound that can be used to treat a disorder characterized by undesired activity or expression of the SNP-containing nucleic acid or the encoded product. The assays can be performed in cell-based and cell-free systems. Cell-based assays can include cells naturally expressing the nucleic acid molecules of interest or recombinant cells genetically engineered to express certain nucleic acid molecules.

[0288] Variant gene expression in an MI patient can include, for example, either expression of a SNP-containing nucleic acid sequence (for instance, a gene that contains a SNP can be transcribed into an mRNA transcript molecule containing the SNP, which can in turn be translated into a variant protein) or altered expression of a normal/wild-type nucleic acid sequence due to one or more SNPs (for instance, a regulatory/control region can contain a SNP that affects the level or pattern of expression of a normal transcript).

[0289] Assays for variant gene expression can involve direct assays of nucleic acid levels (e.g., mRNA levels), expressed protein levels, or of collateral compounds involved in a signal pathway. Further, the expression of genes that are up- or down-regulated in response to the signal pathway can also be assayed. In this embodiment, the regulatory regions of these genes can be operably linked to a reporter gene such as luciferase.

[0290] Modulators of variant gene expression can be identified in a method wherein, for example, a cell is contacted with a candidate compound/agent and the expression of mRNA determined. The level of expression of mRNA in the presence of the candidate compound is compared to the level of expression of mRNA in the absence of the candidate compound. The candidate compound can then be identified as a modulator of variant gene expression based on this comparison and be used to treat a disorder such as MI that is characterized by variant gene expression (e.g., either expression of a SNP-containing nucleic acid or altered expression of a normal/wild-type nucleic acid molecule due to one or more SNPs that affect expression of the nucleic acid molecule) due to one or more SNPs of the present invention. When expression of mRNA is statistically significantly greater in the presence of the candidate compound than in its absence, the candidate compound is identified as a stimulator of nucleic acid expression. When nucleic acid expression is statistically significantly less in the presence of the candidate compound than in its absence, the candidate compound is identified as an inhibitor of nucleic acid expression.

[0291] The invention further provides methods of treatment, with the SNP or associated nucleic acid domain (e.g., catalytic domain, ligand/substrate-binding domain, regulatory/control region, etc.) or gene, or the encoded mRNA transcript, as a target, using a compound identified through drug screening as a gene modulator to modulate variant nucleic acid expression. Modulation can include either up-regulation (i.e., activation or agonization) or down-regulation (i.e., suppression or antagonization) of nucleic acid expression.

[0292] Expression of mRNA transcripts and encoded proteins, either wild type or variant, may be altered in individuals with a particular SNP allele in a regulatory/control element, such as a promoter or transcription factor binding domain, that regulates expression. In this situation, methods of treatment and compounds can be identified, as discussed herein, that regulate or overcome the variant regulatory/control element, thereby generating normal, or healthy, expression levels of either the wild type or variant protein.

[0293] The SNP-containing nucleic acid molecules of the present invention are also useful for monitoring the effectiveness of modulating compounds on the expression or activity of a variant gene, or encoded product, in clinical trials or in a treatment regimen. Thus, the gene expression pattern can serve as an indicator for the continuing effectiveness of treatment with the compound, particularly with compounds to which a patient can develop resistance, as well as an indicator for toxicities. The gene expression pattern can also serve as a marker indicative of a physiological response of the affected cells to the compound. Accordingly, such monitoring would allow either increased administration of the compound or the administration of alternative compounds to which the patient has not become resistant. Similarly, if the level of nucleic acid expression falls below a desirable level, administration of the compound could be commensurately decreased.

[0294] In another aspect of the present invention, there is provided a pharmaceutical pack comprising a therapeutic agent (e.g., a small molecule drug, antibody, peptide, antisense or RNAi nucleic acid molecule, etc.) and a set of instructions for administration of the therapeutic agent to humans diagnostically tested for one or more SNPs or SNP haplotypes provided by the present invention.

[0295] The SNPs/haplotypes of the present invention are also useful for improving many different aspects of the drug development process. For instance, an aspect of the present invention includes selecting individuals for clinical trials based on their SNP genotype. For example, individuals with SNP genotypes that indicate that they are likely to positively respond to a drug can be included in the trials, whereas those individuals whose SNP genotypes indicate that they are less likely to or would not respond to the drug, or who are at risk for suffering toxic effects or other adverse reactions, can be excluded from the clinical trials. This not only can improve the safety of clinical trials, but also can enhance the chances that the trial will demonstrate statistically significant efficacy. Furthermore, the SNPs of the present invention may explain why certain previously developed drugs performed poorly in clinical trials and may help identify a subset of the population that would benefit from a drug that had previously performed poorly in clinical trials, thereby “rescuing” previously developed drugs, and enabling the drug to be made available to a particular MI patient population that can benefit from it.

[0296] SNPs have many important uses in drug discovery, screening, and development. A high probability exists that, for any gene/protein selected as a potential drug target, variants of that gene/protein will exist in a patient population. Thus, determining the impact of gene/protein variants on the selection and delivery of a therapeutic agent should be an integral aspect of the drug discovery and development process. Jazwinska, A Trends Guide to Genetic Variation and Genomic Medicine S30-S36 (March 2002).

[0297] Knowledge of variants (e.g., SNPs and any corresponding amino acid polymorphisms) of a particular therapeutic target (e.g., a gene, mRNA transcript, or protein) enables parallel screening of the variants in order to identify therapeutic candidates (e.g., small molecule compounds, antibodies, antisense or RNAi nucleic acid compounds, etc.) that demonstrate efficacy across variants. Rothberg, Nat Biotechnol 19(3):209-11 (March 2001). Such therapeutic candidates would be expected to show equal efficacy across a larger segment of the patient population, thereby leading to a larger potential market for the therapeutic candidate.

[0298] Furthermore, identifying variants of a potential therapeutic target enables the most common form of the target to be used for selection of therapeutic candidates, thereby helping to ensure that the experimental activity that is observed for the selected candidates reflects the real activity expected in the largest proportion of a patient population. Jazwinska, A Trends Guide to Genetic Variation and Genomic Medicine S30-S36 (March 2002).

[0299] Additionally, screening therapeutic candidates against all known variants of a target can enable the early identification of potential toxicities and adverse reactions relating to particular variants. For example, variability in drug absorption, distribution, metabolism and excretion (ADME) caused by, for example, SNPs in therapeutic targets or drug metabolizing genes, can be identified, and this information can be utilized during the drug development process to minimize variability in drug disposition and develop therapeutic agents that are safer across a wider range of a patient population. The SNPs of the present invention, including the variant proteins and encoding polymorphic nucleic acid molecules provided in Tables 1 and 2, are useful in conjunction with a variety of toxicology methods established in the art, such as those set forth in Current Protocols in Toxicology, John Wiley & Sons, Inc., N.Y.

[0300] Furthermore, therapeutic agents that target any art-known proteins (or nucleic acid molecules, either RNA or DNA) may cross-react with the variant proteins (or polymorphic nucleic acid molecules) disclosed in Table 1, thereby significantly affecting the pharmacokinetic properties of the drug. Consequently, the protein variants and the SNP-containing nucleic acid molecules disclosed in Tables 1 and 2 are useful in developing, screening, and evaluating therapeutic agents that target corresponding art-known protein forms (or nucleic acid molecules). Additionally, as discussed above, knowledge of all polymorphic forms of a particular drug target enables the design of therapeutic agents that are effective against most or all such polymorphic forms of the drug target.

[0301] Pharmaceutical Compositions and Administration Thereof

[0302] Any of the MI-associated proteins, and encoding nucleic acid molecules, disclosed herein can be used as therapeutic targets (or directly used themselves as therapeutic compounds) for treating MI and related pathologies, and the present disclosure enables therapeutic compounds (e.g., small molecules, antibodies, therapeutic proteins, RNAi and antisense molecules, etc.) to be developed that target (or are comprised of) any of these therapeutic targets.

[0303] In general, a therapeutic compound will be administered in a therapeutically effective amount by any of the accepted modes of administration for agents that serve similar utilities. The actual amount of the therapeutic compound of this invention, i.e., the active ingredient, will depend upon numerous factors such as the severity of the disease to be treated, the age and relative health of the subject, the potency of the compound used, the route and form of administration, and other factors.

[0304] Therapeutically effective amounts of therapeutic compounds may range from, for example, approximately 0.01-50 mg per kilogram body weight of the recipient per day; preferably about 0.1-20 mg/kg/day. Thus, as an example, for administration to a 70-kg person, the dosage range would most preferably be about 7 mg to 1.4 g per day.

[0305] In general, therapeutic compounds will be administered as pharmaceutical compositions by any one of the following routes: oral, systemic (e.g., transdermal, intranasal, or by suppository), or parenteral (e.g., intramuscular, intravenous, or subcutaneous) administration. The preferred manner of administration is oral or parenteral using a convenient daily dosage regimen, which can be adjusted according to the degree of affliction. Oral compositions can take the form of tablets, pills, capsules, semisolids, powders, sustained release formulations, solutions, suspensions, elixirs, aerosols, or any other appropriate compositions.

[0306] The choice of formulation depends on various factors such as the mode of drug administration (e.g., for oral administration, formulations in the form of tablets, pills, or capsules are preferred) and the bioavailability of the drug substance. Recently, pharmaceutical formulations have been developed especially for drugs that show poor bioavailability based upon the principle that bioavailability can be increased by increasing the surface area, i.e., decreasing particle size. For example, U.S. Pat. No. 4,107,288 describes a pharmaceutical formulation having particles in the size range from 10 to 1,000 nm in which the active material is supported on a cross-linked matrix of macromolecules. U.S. Pat. No. 5,145,684 describes the production of a pharmaceutical formulation in which the drug substance is pulverized to nanoparticles (average particle size of 400 nm) in the presence of a surface modifier and then dispersed in a liquid medium to give a pharmaceutical formulation that exhibits remarkably high bioavailability.

[0307] Pharmaceutical compositions are comprised of, in general, a therapeutic compound in combination with at least one pharmaceutically acceptable excipient. Acceptable excipients are non-toxic, aid administration, and do not adversely affect the therapeutic benefit of the therapeutic compound. Such excipients may be any solid, liquid, semi-solid or, in the case of an aerosol composition, gaseous excipient that is generally available to one skilled in the art.

[0308] Solid pharmaceutical excipients include starch, cellulose, talc, glucose, lactose, sucrose, gelatin, malt, rice, flour, chalk, silica gel, magnesium stearate, sodium stearate, glycerol monostearate, sodium chloride, dried skim milk and the like. Liquid and semisolid excipients may be selected from glycerol, propylene glycol, water, ethanol and various oils, including those of petroleum, animal, vegetable or synthetic origin, e.g., peanut oil, soybean oil, mineral oil, sesame oil, etc. Preferred liquid carriers, particularly for injectable solutions, include water, saline, aqueous dextrose, and glycols.

[0309] Compressed gases may be used to disperse a compound of this invention in aerosol form. Inert gases suitable for this purpose are nitrogen, carbon dioxide, etc.

[0310] Other suitable pharmaceutical excipients and their formulations are described in Remington's Pharmaceutical Sciences 18^{th} ed., E. W. Martin, ed., Mack Publishing Company (1990).

[0311] The amount of the therapeutic compound in a formulation can vary within the full range employed by those skilled in the art. Typically, the formulation will contain, on a weight percent (wt %) basis, from about 0.01-99.99 wt % of the therapeutic compound based on the total formulation, with the balance being one or more suitable pharmaceutical excipients. Preferably, the compound is present at a level of about 1-80% wt.

[0312] Therapeutic compounds can be administered alone or in combination with other therapeutic compounds or in combination with one or more other active ingredient(s). For example, an inhibitor or stimulator of an MI-associated protein can be administered in combination with another agent that inhibits or stimulates the activity of the same or a different MI-associated protein to thereby counteract the effects of MI.

[0313] For further information regarding pharmacology, see Current Protocols in Pharmacology, John Wiley & Sons, Inc., N.Y.

[0314] Human Identification Applications

[0315] In addition to their diagnostic and therapeutic uses in MI and related pathologies, the SNPs provided by the present invention are also useful as human identification markers for such applications as forensics, paternity testing, and biometrics. See, e.g., Gill, “An assessment of the utility of single nucleotide polymorphisms (SNPs) for forensic purposes,” Int J Legal Med 114(4-5):204-10 (2001). Genetic variations in the nucleic acid sequences between individuals can be used as genetic markers to identify individuals and to associate a biological sample with an individual. Determination of which nucleotides occupy a set of SNP positions in an individual identifies a set of SNP markers that distinguishes the individual. The more SNP positions that are analyzed, the lower the probability that the set of SNPs in one individual is the same as that in an unrelated individual. Preferably, if multiple sites are analyzed, the sites are unlinked (i.e., inherited independently). Thus, preferred sets of SNPs can be selected from among the SNPs disclosed herein, which may include SNPs on different chromosomes, SNPs on different chromosome arms, and/or SNPs that are dispersed over substantial distances along the same chromosome arm.

[0316] Furthermore, among the SNPs disclosed herein, preferred SNPs for use in certain forensic/human identification applications include SNPs located at degenerate codon positions (i.e., the third position in certain codons which can be one of two or more alternative nucleotides and still encode the same amino acid), since these SNPs do not affect the encoded protein. SNPs that do not affect the encoded protein are expected to be under less selective pressure and are therefore expected to be more polymorphic in a population, which is typically an advantage for forensic/human identification applications. However, for certain forensics/human identification applications, such as predicting phenotypic characteristics (e.g., inferring ancestry or inferring one or more physical characteristics of an individual) from a DNA sample, it may be desirable to utilize SNPs that affect the encoded protein.

[0317] For many of the SNPs disclosed in Tables 1 and 2 (which are identified as “Applera” SNP source), Tables 1 and 2 provide SNP allele frequencies obtained by re-sequencing the DNA of chromosomes from 39 individuals (Tables 1 and 2 also provide allele frequency information for “Celera” source SNPs and, where available, public SNPs from dbEST, HGBASE, and/or HGMD). The allele frequencies provided in Tables 1 and 2 enable these SNPs to be readily used for human identification applications. Although any SNP disclosed in Table 1 and/or Table 2 could be used for human identification, the closer that the frequency of the minor allele at a particular SNP site is to 50%, the greater the ability of that SNP to discriminate between different individuals in a population since it becomes increasingly likely that two randomly selected individuals would have different alleles at that SNP site. Using the SNP allele frequencies provided in Tables 1 and 2, one of ordinary skill in the art could readily select a subset of SNPs for which the frequency of the minor allele is, for example, at least 1%, 2%, 5%, 10%, 20%, 25%, 30%, 40%, 45%, or 50%, or any other frequency in-between. Thus, since Tables 1 and 2 provide allele frequencies based on the re-sequencing of the chromosomes from 39 individuals, a subset of SNPs could readily be selected for human identification in which the total allele count of the minor allele at a particular SNP site is, for example, at least 1, 2, 4, 8, 10, 16, 20, 24, 30, 32, 36, 38, 39, 40, or any other number in-between.

[0318] Furthermore, Tables 1 and 2 also provide population group (interchangeably referred to herein as ethnic or racial groups) information coupled with the extensive allele frequency information. For example, the group of 39 individuals whose DNA was re-sequenced was made-up of 20 Caucasians and 19 African-Americans. This population group information enables further refinement of SNP selection for human identification. For example, preferred SNPs for human identification can be selected from Tables 1 and 2 that have similar allele frequencies in both the Caucasian and African-American populations; thus, for example, SNPs can be selected that have equally high discriminatory power in both populations. Alternatively, SNPs can be selected for which there is a statistically significant difference in allele frequencies between the Caucasian and African-American populations (as an extreme example, a particular allele may be observed only in either the Caucasian or the African-American population group but not observed in the other population group); such SNPs are useful, for example, for predicting the race/ethnicity of an unknown perpetrator from a biological sample such as a hair or blood stain recovered at a crime scene. For a discussion of using SNPs to predict ancestry from a DNA sample, including statistical methods, see Frudakis et al., “A Classifier for the SNP-Based Inference of Ancestry,” Journal of Forensic Sciences 48(4):771-782 (2003).

[0319] SNPs have numerous advantages over other types of polymorphic markers, such as short tandem repeats (STRs). For example, SNPs can be easily scored and are amenable to automation, making SNPs the markers of choice for large-scale forensic databases. SNPs are found in much greater abundance throughout the genome than repeat polymorphisms. Population frequencies of two polymorphic forms can usually be determined with greater accuracy than those of multiple polymorphic forms at multi-allelic loci. SNPs are mutationally more stable than repeat polymorphisms. SNPs are not susceptible to artifacts such as stutter bands that can hinder analysis. Stutter bands are frequently encountered when analyzing repeat polymorphisms, and are particularly troublesome when analyzing samples such as crime scene samples that may contain mixtures of DNA from multiple sources. Another significant advantage of SNP markers over STR markers is the much shorter length of nucleic acid needed to score a SNP. For example, STR markers are generally several hundred base pairs in length. A SNP, on the other hand, comprises a single nucleotide, and generally a short conserved region on either side of the SNP position for primer and/or probe binding. This makes SNPs more amenable to typing in highly degraded or aged biological samples that are frequently encountered in forensic casework in which DNA may be fragmented into short pieces.

[0320] SNPs also are not subject to microvariant and “off-ladder” alleles frequently encountered when analyzing STR loci. Microvariants are deletions or insertions within a repeat unit that change the size of the amplified DNA product so that the amplified product does not migrate at the same rate as reference alleles with normal sized repeat units. When separated by size, such as by electrophoresis on a polyacrylamide gel, microvariants do not align with a reference allelic ladder of standard sized repeat units, but rather migrate between the reference alleles. The reference allelic ladder is used for precise sizing of alleles for allele classification; therefore alleles that do not align with the reference allelic ladder lead to substantial analysis problems. Furthermore, when analyzing multi-allelic repeat polymorphisms, occasionally an allele is found that consists of more or less repeat units than has been previously seen in the population, or more or less repeat alleles than are included in a reference allelic ladder. These alleles will migrate outside the size range of known alleles in a reference allelic ladder, and therefore are referred to as “off-ladder” alleles. In extreme cases, the allele may contain so few or so many repeats that it migrates well out of the range of the reference allelic ladder. In this situation, the allele may not even be observed, or, with multiplex analysis, it may migrate within or close to the size range for another locus, further confounding analysis.

[0321] SNP analysis avoids the problems of microvariants and off-ladder alleles encountered in STR analysis. Importantly, microvariants and off-ladder alleles may provide significant problems, and may be completely missed, when using analysis methods such as oligonucleotide hybridization arrays, which utilize oligonucleotide probes specific for certain known alleles. Furthermore, off-ladder alleles and microvariants encountered with STR analysis, even when correctly typed, may lead to improper statistical analysis, since their frequencies in the population are generally unknown or poorly characterized, and therefore the statistical significance of a matching genotype may be questionable. All these advantages of SNP analysis are considerable in light of the consequences of most DNA identification cases, which may lead to life imprisonment for an individual, or re-association of remains to the family of a deceased individual.

[0322] DNA can be isolated from biological samples such as blood, bone, hair, saliva, or semen, and compared with the DNA from a reference source at particular SNP positions. Multiple SNP markers can be assayed simultaneously in order to increase the power of discrimination and the statistical significance of a matching genotype. For example, oligonucleotide arrays can be used to genotype a large number of SNPs simultaneously. The SNPs provided by the present invention can be assayed in combination with other polymorphic genetic markers, such as other SNPs known in the art or STRs, in order to identify an individual or to associate an individual with a particular biological sample.

[0323] Furthermore, the SNPs provided by the present invention can be genotyped for inclusion in a database of DNA genotypes, for example, a criminal DNA databank such as the FBI's Combined DNA Index System (CODIS) database. A genotype obtained from a biological sample of unknown source can then be queried against the database to find a matching genotype, with the SNPs of the present invention providing nucleotide positions at which to compare the known and unknown DNA sequences for identity. Accordingly, the present invention provides a database comprising novel SNPs or SNP alleles of the present invention (e.g., the database can comprise information indicating which alleles are possessed by individual members of a population at one or more novel SNP sites of the present invention), such as for use in forensics, biometrics, or other human identification applications. Such a database typically comprises a computer-based system in which the SNPs or SNP alleles of the present invention are recorded on a computer readable medium (see the section of the present specification entitled “Computer-Related Embodiments”).

[0324] The SNPs of the present invention can also be assayed for use in paternity testing. The object of paternity testing is usually to determine whether a male is the father of a child. In most cases, the mother of the child is known and thus, the mother's contribution to the child's genotype can be traced. Paternity testing investigates whether the part of the child's genotype not attributable to the mother is consistent with that of the putative father. Paternity testing can be performed by analyzing sets of polymorphisms in the putative father and the child, with the SNPs of the present invention providing nucleotide positions at which to compare the putative father's and child's DNA sequences for identity. If the set of polymorphisms in the child attributable to the father does not match the set of polymorphisms of the putative father, it can be concluded, barring experimental error, that the putative father is not the father of the child. If the set of polymorphisms in the child attributable to the father match the set of polymorphisms of the putative father, a statistical calculation can be performed to determine the probability of coincidental match, and a conclusion drawn as to the likelihood that the putative father is the true biological father of the child.

[0325] In addition to paternity testing, SNPs are also useful for other types of kinship testing, such as for verifying familial relationships for immigration purposes, or for cases in which an individual alleges to be related to a deceased individual in order to claim an inheritance from the deceased individual, etc. For further information regarding the utility of SNPs for paternity testing and other types of kinship testing, including methods for statistical analysis, see Krawczak, “Informativity assessment for biallelic single nucleotide polymorphisms,” Electrophoresis 20(8):1676-81 (June 1999).

[0326] The use of the SNPs of the present invention for human identification further extends to various authentication systems, commonly referred to as biometric systems, which typically convert physical characteristics of humans (or other organisms) into digital data. Biometric systems include various technological devices that measure such unique anatomical or physiological characteristics as finger, thumb, or palm prints; hand geometry; vein patterning on the back of the hand; blood vessel patterning of the retina and color and texture of the iris; facial characteristics; voice patterns; signature and typing dynamics; and DNA. Such physiological measurements can be used to verify identity and, for example, restrict or allow access based on the identification. Examples of applications for biometrics include physical area security, computer and network security, aircraft passenger check-in and boarding, financial transactions, medical records access, government benefit distribution, voting, law enforcement, passports, visas and immigration, prisons, various military applications, and for restricting access to expensive or dangerous items, such as automobiles or guns. See, for example, O'Connor, Stanford Technology Law Review, and U.S. Pat. No. 6,119,096.

[0327] Groups of SNPs, particularly the SNPs provided by the present invention, can be typed to uniquely identify an individual for biometric applications such as those described above. Such SNP typing can readily be accomplished using, for example, DNA chips/arrays. Preferably, a minimally invasive means for obtaining a DNA sample is utilized. For example, PCR amplification enables sufficient quantities of DNA for analysis to be obtained from buccal swabs or fingerprints, which contain DNA-containing skin cells and oils that are naturally transferred during contact.

[0328] Further information regarding techniques for using SNPs in forensic/human identification applications can be found, for example, in Current Protocols in Human Genetics 14.1-14.7, John Wiley & Sons, N.Y. (2002).

[0329] Variant Proteins, Antibodies, Vectors, Host Cells, & Uses Thereof

[0330] Variant Proteins Encoded by SNP-Containing Nucleic Acid Molecules

[0331] The present invention provides SNP-containing nucleic acid molecules, many of which encode proteins having variant amino acid sequences as compared to the art-known (i.e., wild-type) proteins. Amino acid sequences encoded by the polymorphic nucleic acid molecules of the present invention are referred to as SEQ ID NOS: 21-40 in Table 1 and provided in the Sequence Listing. These variants will generally be referred to herein as variant proteins/peptides/polypeptides, or polymorphic proteins/peptides/polypeptides of the present invention. The terms “protein,” “peptide,” and “polypeptide” are used herein interchangeably.

[0332] A variant protein of the present invention may be encoded by, for example, a nonsynonymous nucleotide substitution at any one of the cSNP positions disclosed herein. In addition, variant proteins may also include proteins whose expression, structure, and/or function is altered by a SNP disclosed herein, such as a SNP that creates or destroys a stop codon, a SNP that affects splicing, and a SNP in control/regulatory elements, e.g. promoters, enhancers, or transcription factor binding domains.

[0333] As used herein, a protein or peptide is said to be “isolated” or “purified” when it is substantially free of cellular material or chemical precursors or other chemicals. The variant proteins of the present invention can be purified to homogeneity or other lower degrees of purity. The level of purification will be based on the intended use. The key feature is that the preparation allows for the desired function of the variant protein, even if in the presence of considerable amounts of other components.

[0334] As used herein, “substantially free of cellular material” includes preparations of the variant protein having less than about 30% (by dry weight) other proteins (i.e., contaminating protein), less than about 20% other proteins, less than about 10% other proteins, or less than about 5% other proteins. When the variant protein is recombinantly produced, it can also be substantially free of culture medium, i.e., culture medium represents less than about 20% of the volume of the protein preparation.

[0335] The language “substantially free of chemical precursors or other chemicals” includes preparations of the variant protein in which it is separated from chemical precursors or other chemicals that are involved in its synthesis. In one embodiment, the language “substantially free of chemical precursors or other chemicals” includes preparations of the variant protein having less than about 30% (by dry weight) chemical precursors or other chemicals, less than about 20% chemical precursors or other chemicals, less than about 10% chemical precursors or other chemicals, or less than about 5% chemical precursors or other chemicals.

[0336] An isolated variant protein may be purified from cells that naturally express it, purified from cells that have been altered to express it (recombinant host cells), or synthesized using known protein synthesis methods. For example, a nucleic acid molecule containing SNP(s) encoding the variant protein can be cloned into an expression vector, the expression vector introduced into a host cell, and the variant protein expressed in the host cell. The variant protein can then be isolated from the cells by any appropriate purification scheme using standard protein purification techniques. Examples of these techniques are described in detail below. Sambrook and Russell, Molecular Cloning: A Laboratory Manual, Cold Spring Harbor Laboratory Press, N.Y. (2000).

[0337] The present invention provides isolated variant proteins that comprise, consist of or consist essentially of amino acid sequences that contain one or more variant amino acids encoded by one or more codons that contain a SNP of the present invention.

[0338] Accordingly, the present invention provides variant proteins that consist of amino acid sequences that contain one or more amino acid polymorphisms (or truncations or extensions due to creation or destruction of a stop codon, respectively) encoded by the SNPs provided in Table 1 and/or Table 2. A protein consists of an amino acid sequence when the amino acid sequence is the entire amino acid sequence of the protein.

[0339] The present invention further provides variant proteins that consist essentially of amino acid sequences that contain one or more amino acid polymorphisms (or truncations or extensions due to creation or destruction of a stop codon, respectively) encoded by the SNPs provided in Table 1 and/or Table 2. A protein consists essentially of an amino acid sequence when such an amino acid sequence is present with only a few additional amino acid residues in the final protein.

[0340] The present invention further provides variant proteins that comprise amino acid sequences that contain one or more amino acid polymorphisms (or truncations or extensions due to creation or destruction of a stop codon, respectively) encoded by the SNPs provided in Table 1 and/or Table 2. A protein comprises an amino acid sequence when the amino acid sequence is at least part of the final amino acid sequence of the protein. In such a fashion, the protein may contain only the variant amino acid sequence or have additional amino acid residues, such as a contiguous encoded sequence that is naturally associated with it or heterologous amino acid residues. Such a protein can have a few additional amino acid residues or can comprise many more additional amino acids. A brief description of how various types of these proteins can be made and isolated is provided below.

[0341] The variant proteins of the present invention can be attached to heterologous sequences to form chimeric or fusion proteins. Such chimeric and fusion proteins comprise a variant protein operatively linked to a heterologous protein having an amino acid sequence not substantially homologous to the variant protein. “Operatively linked” indicates that the coding sequences for the variant protein and the heterologous protein are ligated in-frame. The heterologous protein can be fused to the N-terminus or C-terminus of the variant protein. In another embodiment, the fusion protein is encoded by a fusion polynucleotide that is synthesized by conventional techniques including automated DNA synthesizers. Alternatively, PCR amplification of gene fragments can be carried out using anchor primers which give rise to complementary overhangs between two consecutive gene fragments which can subsequently be annealed and re-amplified to generate a chimeric gene sequence. See Ausubel et al., Current Protocols in Molecular Biology (1992). Moreover, many expression vectors are commercially available that already encode a fusion moiety (e.g., a GST protein). A variant protein-encoding nucleic acid can be cloned into such an expression vector such that the fusion moiety is linked in-frame to the variant protein.

[0342] In many uses, the fusion protein does not affect the activity of the variant protein. The fusion protein can include, but is not limited to, enzymatic fusion proteins, for example, beta-galactosidase fusions, yeast two-hybrid GAL fusions, poly-His fusions, MYC-tagged, HI-tagged and Ig fusions. Such fusion proteins, particularly poly-His fusions, can facilitate their purification following recombinant expression. In certain host cells (e.g., mammalian host cells), expression and/or secretion of a protein can be increased by using a heterologous signal sequence. Fusion proteins are further described in, for example, Terpe, “Overview of tag protein fusions: from molecular and biochemical fundamentals to commercial systems,” Appl Microbiol Biotechnol 60(5):523-33 (January 2003); Epub Nov. 7, 2002; Graddis et al., “Designing proteins that work using recombinant technologies,” Curr Pharm Biotechnol 3(4):285-97 (December 2002); and Nilsson et al., “Affinity fusion strategies for detection, purification, and immobilization of recombinant proteins,” Protein Expr Purif 11(1):1-16 (October 1997).

[0343] The present invention also relates to further obvious variants of the variant polypeptides of the present invention, such as naturally-occurring mature forms (e.g., allelic variants), non-naturally occurring recombinantly-derived variants, and orthologs and paralogs of such proteins that share sequence homology. Such variants can readily be generated using art-known techniques in the fields of recombinant nucleic acid technology and protein biochemistry. It is understood, however, that variants exclude those known in the prior art before the present invention.

[0344] Further variants of the variant polypeptides disclosed in Table 1 can comprise an amino acid sequence that shares at least 70-80%, 80-85%, 85-90%, 91%, 92%, 93%, 94%, 95%, 96%, 97%, 98%, or 99% sequence identity with an amino acid sequence disclosed in Table 1 (or a fragment thereof) and that includes a novel amino acid residue (allele) disclosed in Table 1 (which is encoded by a novel SNP allele). Thus, an aspect of the present invention that is specifically contemplated are polypeptides that have a certain degree of sequence variation compared with the polypeptide sequences shown in Table 1, but that contain a novel amino acid residue (allele) encoded by a novel SNP allele disclosed herein. In other words, as long as a polypeptide contains a novel amino acid residue disclosed herein, other portions of the polypeptide that flank the novel amino acid residue can vary to some degree from the polypeptide sequences shown in Table 1.

[0345] Full-length pre-processed forms, as well as mature processed forms, of proteins that comprise one of the amino acid sequences disclosed herein can readily be identified as having complete sequence identity to one of the variant proteins of the present invention as well as being encoded by the same genetic locus as the variant proteins provided herein.

[0346] Orthologs of a variant peptide can readily be identified as having some degree of significant sequence homology/identity to at least a portion of a variant peptide as well as being encoded by a gene from another organism. Preferred orthologs will be isolated from non-human mammals, preferably primates, for the development of human therapeutic targets and agents. Such orthologs can be encoded by a nucleic acid sequence that hybridizes to a variant peptide-encoding nucleic acid molecule under moderate to stringent conditions depending on the degree of relatedness of the two organisms yielding the homologous proteins.

[0347] Variant proteins include, but are not limited to, proteins containing deletions, additions and substitutions in the amino acid sequence caused by the SNPs of the present invention. One class of substitutions is conserved amino acid substitutions in which a given amino acid in a polypeptide is substituted for another amino acid of like characteristics. Typical conservative substitutions are replacements, one for another, among the aliphatic amino acids Ala, Val, Leu, and Ile; interchange of the hydroxyl residues Ser and Thr; exchange of the acidic residues Asp and Glu; substitution between the amide residues Asn and Gln; exchange of the basic residues Lys and Arg; and replacements among the aromatic residues Phe and Tyr. Guidance concerning which amino acid changes are likely to be phenotypically silent are found, for example, in Bowie et al., Science 247:1306-1310 (1990).

[0348] Variant proteins can be fully functional or can lack function in one or more activities, e.g. ability to bind another molecule, ability to catalyze a substrate, ability to mediate signaling, etc. Fully functional variants typically contain only conservative variations or variations in non-critical residues or in non-critical regions. Functional variants can also contain substitution of similar amino acids that result in no change or an insignificant change in function. Alternatively, such substitutions may positively or negatively affect function to some degree. Non-functional variants typically contain one or more non-conservative amino acid substitutions, deletions, insertions, inversions, truncations or extensions, or a substitution, insertion, inversion, or deletion of a critical residue or in a critical region.

[0349] Amino acids that are essential for function of a protein can be identified by methods known in the art, such as site-directed mutagenesis or alanine-scanning mutagenesis, particularly using the amino acid sequence and polymorphism information provided in Table 1. Cunningham et al., Science 244:1081-1085 (1989). The latter procedure introduces single alanine mutations at every residue in the molecule. The resulting mutant molecules are then tested for biological activity such as enzyme activity or in assays such as an in vitro proliferative activity. Sites that are critical for binding partner/substrate binding can also be determined by structural analysis such as crystallization, nuclear magnetic resonance or photoaffinity labeling. Smith et al, J Mol Biol 224:899-904 (1992); de Vos et al., Science 255:306-312 (1992).

[0350] Polypeptides can contain amino acids other than the 20 amino acids commonly referred to as the 20 naturally occurring amino acids. Further, many amino acids, including the terminal amino acids, may be modified by natural processes, such as processing and other post-translational modifications, or by chemical modification techniques well known in the art. Accordingly, the variant proteins of the present invention also encompass derivatives or analogs in which a substituted amino acid residue is not one encoded by the genetic code, in which a substituent group is included, in which the mature polypeptide is fused with another compound, such as a compound to increase the half-life of the polypeptide (e.g., polyethylene glycol), or in which additional amino acids are fused to the mature polypeptide, such as a leader or secretory sequence or a sequence for purification of the mature polypeptide or a pro-protein sequence.

[0351] Known protein modifications include, but are not limited to, acetylation, acylation, ADP-ribosylation, amidation, covalent attachment of flavin, covalent attachment of a heme moiety, covalent attachment of a nucleotide or nucleotide derivative, covalent attachment of a lipid or lipid derivative, covalent attachment of phosphotidylinositol, cross-linking, cyclization, disulfide bond formation, demethylation, formation of covalent crosslinks, formation of cystine, formation of pyroglutamate, formylation, gamma carboxylation, glycosylation, GPI anchor formation, hydroxylation, iodination, methylation, myristoylation, oxidation, proteolytic processing, phosphorylation, prenylation, racemization, selenoylation, sulfation, transfer-RNA mediated addition of amino acids to proteins such as arginylation, and ubiquitination.

[0352] Such protein modifications are well known to those of skill in the art and have been described in great detail in the scientific literature. Particularly common modifications, for example glycosylation, lipid attachment, sulfation, gamma-carboxylation of glutamic acid residues, hydroxylation and ADP-ribosylation, are described in most basic texts, such as Proteins—Structure and Molecular Properties 2nd Ed., T. E. Creighton, W.H. Freeman and Company, N.Y. (1993); F. Wold, Posttranslational Covalent Modification of Proteins 1-12, B. C. Johnson, ed., Academic Press, N.Y. (1983); Seifter et al., Meth Enzymol 182:626-646 (1990); and Rattan et al., Ann NY Acad Sci 663:48-62 (1992).

[0353] The present invention further provides fragments of the variant proteins in which the fragments contain one or more amino acid sequence variations (e.g., substitutions, or truncations or extensions due to creation or destruction of a stop codon) encoded by one or more SNPs disclosed herein. The fragments to which the invention pertains, however, are not to be construed as encompassing fragments that have been disclosed in the prior art before the present invention.

[0354] As used herein, a fragment may comprise at least about 4, 8, 10, 12, 14, 16, 18, 20, 25, 30, 50, 100 (or any other number in-between) or more contiguous amino acid residues from a variant protein, wherein at least one amino acid residue is affected by a SNP of the present invention, e.g., a variant amino acid residue encoded by a nonsynonymous nucleotide substitution at a cSNP position provided by the present invention. The variant amino acid encoded by a cSNP may occupy any residue position along the sequence of the fragment. Such fragments can be chosen based on the ability to retain one or more of the biological activities of the variant protein or the ability to perform a function, e.g., act as an immunogen. Particularly important fragments are biologically active fragments. Such fragments will typically comprise a domain or motif of a variant protein of the present invention, e.g., active site, transmembrane domain, or ligand/substrate binding domain. Other fragments include, but are not limited to, domain or motif-containing fragments, soluble peptide fragments, and fragments containing immunogenic structures. Predicted domains and functional sites are readily identifiable by computer programs well known to those of skill in the art (e.g., PROSITE analysis). Current Protocols in Protein Science, John Wiley & Sons, N.Y. (2002).

[0355] Uses of Variant Proteins

[0356] The variant proteins of the present invention can be used in a variety of ways, including but not limited to, in assays to determine the biological activity of a variant protein, such as in a panel of multiple proteins for high-throughput screening; to raise antibodies or to elicit another type of immune response; as a reagent (including the labeled reagent) in assays designed to quantitatively determine levels of the variant protein (or its binding partner) in biological fluids; as a marker for cells or tissues in which it is preferentially expressed (either constitutively or at a particular stage of tissue differentiation or development or in a disease state); as a target for screening for a therapeutic agent; and as a direct therapeutic agent to be administered into a human subject. Any of the variant proteins disclosed herein may be developed into reagent grade or kit format for commercialization as research products. Methods for performing the uses listed above are well known to those skilled in the art. See, e.g., Molecular Cloning: A Laboratory Manual, Sambrook and Russell, Cold Spring Harbor Laboratory Press, N.Y. (2000), and Methods in Enzymology: Guide to Molecular Cloning Techniques, S. L. Berger and A. R. Kimmel, eds., Academic Press (1987).

[0357] In a specific embodiment of the invention, the methods of the present invention include detection of one or more variant proteins disclosed herein. Variant proteins are disclosed in Table 1 and in the Sequence Listing as a#1-a#1. Detection of such proteins can be accomplished using, for example, antibodies, small molecule compounds, aptamers, ligands/substrates, other proteins or protein fragments, or other protein-binding agents. Preferably, protein detection agents are specific for a variant protein of the present invention and can therefore discriminate between a variant protein of the present invention and the wild-type protein or another variant form. This can generally be accomplished by, for example, selecting or designing detection agents that bind to the region of a protein that differs between the variant and wild-type protein, such as a region of a protein that contains one or more amino acid substitutions that is/are encoded by a non-synonymous cSNP of the present invention, or a region of a protein that follows a nonsense mutation-type SNP that creates a stop codon thereby leading to a shorter polypeptide, or a region of a protein that follows a read-through mutation-type SNP that destroys a stop codon thereby leading to a longer polypeptide in which a portion of the polypeptide is present in one version of the polypeptide but not the other.

[0358] In another specific aspect of the invention, the variant proteins of the present invention are used as targets for diagnosing MI or for determining predisposition to MI in a human. Accordingly, the invention provides methods for detecting the presence of, or levels of, one or more variant proteins of the present invention in a cell, tissue, or organism. Such methods typically involve contacting a test sample with an agent (e.g., an antibody, small molecule compound, or peptide) capable of interacting with the variant protein such that specific binding of the agent to the variant protein can be detected. Such an assay can be provided in a single detection format or a multi-detection format such as an array, for example, an antibody or aptamer array (arrays for protein detection may also be referred to as “protein chips”). The variant protein of interest can be isolated from a test sample and assayed for the presence of a variant amino acid sequence encoded by one or more SNPs disclosed by the present invention. The SNPs may cause changes to the protein and the corresponding protein function/activity, such as through non-synonymous substitutions in protein coding regions that can lead to amino acid substitutions, deletions, insertions, and/or rearrangements; formation or destruction of stop codons; or alteration of control elements such as promoters. SNPs may also cause inappropriate post-translational modifications.

[0359] One preferred agent for detecting a variant protein in a sample is an antibody capable of selectively binding to a variant form of the protein (antibodies are described in greater detail in the next section). Such samples include, for example, tissues, cells, and biological fluids isolated from a subject, as well as tissues, cells and fluids present within a subject.

[0360] In vitro methods for detection of the variant proteins associated with MI that are disclosed herein and fragments thereof include, but are not limited to, enzyme linked immunosorbent assays (ELISAs), radioimmunoassays (RIA), Western blots, immunoprecipitations, immunofluorescence, and protein arrays/chips (e.g., arrays of antibodies or aptamers). For further information regarding immunoassays and related protein detection methods, see Current Protocols in Immunology, John Wiley & Sons, N.Y., and Hage, “Immunoassays,” Anal Chem 15; 71(12):294R-304R (June 1999).

[0361] Additional analytic methods of detecting amino acid variants include, but are not limited to, altered electrophoretic mobility, altered tryptic peptide digest, altered protein activity in cell-based or cell-free assay, alteration in ligand or antibody-binding pattern, altered isoelectric point, and direct amino acid sequencing.

[0362] Alternatively, variant proteins can be detected in vivo in a subject by introducing into the subject a labeled antibody (or other type of detection reagent) specific for a variant protein. For example, the antibody can be labeled with a radioactive marker whose presence and location in a subject can be detected by standard imaging techniques.

[0363] Other uses of the variant peptides of the present invention are based on the class or action of the protein. For example, proteins isolated from humans and their mammalian orthologs serve as targets for identifying agents (e.g., small molecule drugs or antibodies) for use in therapeutic applications, particularly for modulating a biological or pathological response in a cell or tissue that expresses the protein. Pharmaceutical agents can be developed that modulate protein activity.

[0364] As an alternative to modulating gene expression, therapeutic compounds can be developed that modulate protein function. For example, many SNPs disclosed herein affect the amino acid sequence of the encoded protein (e.g., non-synonymous cSNPs and nonsense mutation-type SNPs). Such alterations in the encoded amino acid sequence may affect protein function, particularly if such amino acid sequence variations occur in functional protein domains, such as catalytic domains, ATP-binding domains, or ligand/substrate binding domains. It is well established in the art that variant proteins having amino acid sequence variations in functional domains can cause or influence pathological conditions. In such instances, compounds (e.g., small molecule drugs or antibodies) can be developed that target the variant protein and modulate (e.g., up- or down-regulate) protein function/activity.

[0365] The therapeutic methods of the present invention further include methods that target one or more variant proteins of the present invention. Variant proteins can be targeted using, for example, small molecule compounds, antibodies, aptamers, ligands/substrates, other proteins, or other protein-binding agents. Additionally, the skilled artisan will recognize that the novel protein variants (and polymorphic nucleic acid molecules) disclosed in Table 1 may themselves be directly used as therapeutic agents by acting as competitive inhibitors of corresponding art-known proteins (or nucleic acid molecules such as mRNA molecules).

[0366] The variant proteins of the present invention are particularly useful in drug screening assays, in cell-based or cell-free systems. Cell-based systems can utilize cells that naturally express the protein, a biopsy specimen, or cell cultures. In one embodiment, cell-based assays involve recombinant host cells expressing the variant protein. Cell-free assays can be used to detect the ability of a compound to directly bind to a variant protein or to the corresponding SNP-containing nucleic acid fragment that encodes the variant protein.

[0367] A variant protein of the present invention, as well as appropriate fragments thereof, can be used in high-throughput screening assays to test candidate compounds for the ability to bind and/or modulate the activity of the variant protein. These candidate compounds can be further screened against a protein having normal function (e.g., a wild-type/non-variant protein) to further determine the effect of the compound on the protein activity. Furthermore, these compounds can be tested in animal or invertebrate systems to determine in vivo activity/effectiveness. Compounds can be identified that activate (agonists) or inactivate (antagonists) the variant protein, and different compounds can be identified that cause various degrees of activation or inactivation of the variant protein.

[0368] Further, the variant proteins can be used to screen a compound for the ability to stimulate or inhibit interaction between the variant protein and a target molecule that normally interacts with the protein. The target can be a ligand, a substrate or a binding partner that the protein normally interacts with (for example, epinephrine or norepinephrine). Such assays typically include the steps of combining the variant protein with a candidate compound under conditions that allow the variant protein, or fragment thereof, to interact with the target molecule, and to detect the formation of a complex between the protein and the target or to detect the biochemical consequence of the interaction with the variant protein and the target, such as any of the associated effects of signal transduction.

[0369] Candidate compounds include, for example, 1) peptides such as soluble peptides, including Ig-tailed fusion peptides and members of random peptide libraries (see, e.g., Lam et al., Nature 354:82-84 (1991); Houghten et al., Nature 354:84-86 (1991)) and combinatorial chemistry-derived molecular libraries made of D- and/or L-configuration amino acids; 2) phosphopeptides (e.g., members of random and partially degenerate, directed phosphopeptide libraries, see, e.g., Songyang et al., Cell 72:767-778 (1993)); 3) antibodies (e.g., polyclonal, monoclonal, humanized, anti-idiotypic, chimeric, and single chain antibodies as well as Fab, F(ab′)₂, Fab expression library fragments, and epitope-binding fragments of antibodies); and 4) small organic and inorganic molecules (e.g., molecules obtained from combinatorial and natural product libraries).

[0370] One candidate compound is a soluble fragment of the variant protein that competes for ligand binding. Other candidate compounds include mutant proteins or appropriate fragments containing mutations that affect variant protein function and thus compete for ligand. Accordingly, a fragment that competes for ligand, for example with a higher affinity, or a fragment that binds ligand but does not allow release, is encompassed by the invention.

[0371] The invention further includes other end point assays to identify compounds that modulate (stimulate or inhibit) variant protein activity. The assays typically involve an assay of events in the signal transduction pathway that indicate protein activity. Thus, the expression of genes that are up or down-regulated in response to the variant protein dependent signal cascade can be assayed. In one embodiment, the regulatory region of such genes can be operably linked to a marker that is easily detectable, such as luciferase. Alternatively, phosphorylation of the variant protein, or a variant protein target, could also be measured. Any of the biological or biochemical functions mediated by the variant protein can be used as an endpoint assay. These include all of the biochemical or biological events described herein, in the references cited herein, incorporated by reference for these endpoint assay targets, and other functions known to those of ordinary skill in the art.

[0372] Binding and/or activating compounds can also be screened by using chimeric variant proteins in which an amino terminal extracellular domain or parts thereof, an entire transmembrane domain or subregions, and/or the carboxyl terminal intracellular domain or parts thereof, can be replaced by heterologous domains or subregions. For example, a substrate-binding region can be used that interacts with a different substrate than that which is normally recognized by a variant protein. Accordingly, a different set of signal transduction components is available as an end-point assay for activation. This allows for assays to be performed in other than the specific host cell from which the variant protein is derived.

[0373] The variant proteins are also useful in competition binding assays in methods designed to discover compounds that interact with the variant protein. Thus, a compound can be exposed to a variant protein under conditions that allow the compound to bind or to otherwise interact with the variant protein. A binding partner, such as ligand, that normally interacts with the variant protein is also added to the mixture. If the test compound interacts with the variant protein or its binding partner, it decreases the amount of complex formed or activity from the variant protein. This type of assay is particularly useful in screening for compounds that interact with specific regions of the variant protein. Hodgson, Bio/technology, 10(9), 973-80 (September 1992).

[0374] To perform cell-free drug screening assays, it is sometimes desirable to immobilize either the variant protein or a fragment thereof, or its target molecule, to facilitate separation of complexes from uncomplexed forms of one or both of the proteins, as well as to accommodate automation of the assay. Any method for immobilizing proteins on matrices can be used in drug screening assays. In one embodiment, a fusion protein containing an added domain allows the protein to be bound to a matrix. For example, glutathione-S-transferase/¹²⁵I fusion proteins can be adsorbed onto glutathione sepharose beads (Sigma Chemical, St. Louis, Mo.) or glutathione derivatized microtitre plates, which are then combined with the cell lysates (e.g., ³⁵S-labeled) and a candidate compound, such as a drug candidate, and the mixture incubated under conditions conducive to complex formation (e.g., at physiological conditions for salt and pH). Following incubation, the beads can be washed to remove any unbound label, and the matrix immobilized and radiolabel determined directly, or in the supernatant after the complexes are dissociated. Alternatively, the complexes can be dissociated from the matrix, separated by SDS-PAGE, and the level of bound material found in the bead fraction quantitated from the gel using standard electrophoretic techniques.

[0375] Either the variant protein or its target molecule can be immobilized utilizing conjugation of biotin and streptavidin. Alternatively, antibodies reactive with the variant protein but which do not interfere with binding of the variant protein to its target molecule can be derivatized to the wells of the plate, and the variant protein trapped in the wells by antibody conjugation. Preparations of the target molecule and a candidate compound are incubated in the variant protein-presenting wells and the amount of complex trapped in the well can be quantitated. Methods for detecting such complexes, in addition to those described above for the GST-immobilized complexes, include immunodetection of complexes using antibodies reactive with the protein target molecule, or which are reactive with variant protein and compete with the target molecule, and enzyme-linked assays that rely on detecting an enzymatic activity associated with the target molecule.

[0376] Modulators of variant protein activity identified according to these drug screening assays can be used to treat a subject with a disorder mediated by the protein pathway, such as MI. These methods of treatment typically include the steps of administering the modulators of protein activity in a pharmaceutical composition to a subject in need of such treatment.

[0377] The variant proteins, or fragments thereof, disclosed herein can themselves be directly used to treat a disorder characterized by an absence of, inappropriate, or unwanted expression or activity of the variant protein. Accordingly, methods for treatment include the use of a variant protein disclosed herein or fragments thereof.

[0378] In yet another aspect of the invention, variant proteins can be used as “bait proteins” in a two-hybrid assay or three-hybrid assay to identify other proteins that bind to or interact with the variant protein and are involved in variant protein activity. See, e.g., U.S. Pat. No. 5,283,317; Zervos et al., Cell 72:223-232 (1993); Madura et al., J Biol Chem 268:12046-12054 (1993); Bartel et al., Biotechniques 14:920-924 (1993); Iwabuchi et al., Oncogene 8:1693-1696 (1993); and Brent, W O 94/10300. Such variant protein-binding proteins are also likely to be involved in the propagation of signals by the variant proteins or variant protein targets as, for example, elements of a protein-mediated signaling pathway. Alternatively, such variant protein-binding proteins are inhibitors of the variant protein.

[0379] The two-hybrid system is based on the modular nature of most transcription factors, which typically consist of separable DNA-binding and activation domains. Briefly, the assay typically utilizes two different DNA constructs. In one construct, the gene that codes for a variant protein is fused to a gene encoding the DNA binding domain of a known transcription factor (e.g., GAL-4). In the other construct, a DNA sequence, from a library of DNA sequences, that encodes an unidentified protein (“prey” or “sample”) is fused to a gene that codes for the activation domain of the known transcription factor. If the “bait” and the “prey” proteins are able to interact, in vivo, forming a variant protein-dependent complex, the DNA-binding and activation domains of the transcription factor are brought into close proximity. This proximity allows transcription of a reporter gene (e.g., LacZ) that is operably linked to a transcriptional regulatory site responsive to the transcription factor. Expression of the reporter gene can be detected, and cell colonies containing the functional transcription factor can be isolated and used to obtain the cloned gene that encodes the protein that interacts with the variant protein.

[0380] Antibodies Directed to Variant Proteins

[0381] The present invention also provides antibodies that selectively bind to the variant proteins disclosed herein and fragments thereof. Such antibodies may be used to quantitatively or qualitatively detect the variant proteins of the present invention. As used herein, an antibody selectively binds a target variant protein when it binds the variant protein and does not significantly bind to non-variant proteins, i.e., the antibody does not significantly bind to normal, wild-type, or art-known proteins that do not contain a variant amino acid sequence due to one or more SNPs of the present invention (variant amino acid sequences may be due to, for example, nonsynonymous cSNPs, nonsense SNPs that create a stop codon, thereby causing a truncation of a polypeptide or SNPs that cause read-through mutations resulting in an extension of a polypeptide).

[0382] As used herein, an antibody is defined in terms consistent with that recognized in the art: they are multi-subunit proteins produced by an organism in response to an antigen challenge. The antibodies of the present invention include both monoclonal antibodies and polyclonal antibodies, as well as antigen-reactive proteolytic fragments of such antibodies, such as Fab, F(ab)′₂, and Fv fragments. In addition, an antibody of the present invention further includes any of a variety of engineered antigen-binding molecules such as a chimeric antibody (U.S. Pat. Nos. 4,816,567 and 4,816,397; Morrison et al., Proc Natl Acad Sci USA 81:6851 (1984); Neuberger et al., Nature 312:604 (1984)), a humanized antibody (U.S. Pat. Nos. 5,693,762; 5,585,089 and 5,565,332), a single-chain Fv (U.S. Pat. No. 4,946,778; Ward et al., Nature 334:544 (1989)), a bispecific antibody with two binding specificities (Segal et al., J Immunol Methods 248:1 (2001); Carter, J Immunol Methods 248:7 (2001)), a diabody, a triabody, and a tetrabody (Todorovska et al., J Immunol Methods 248:47 (2001)), as well as a Fab conjugate (dimer or trimer), and a minibody.

[0383] Many methods are known in the art for generating and/or identifying antibodies to a given target antigen. Harlow, Antibodies, Cold Spring Harbor Press, N.Y. (1989). In general, an isolated peptide (e.g., a variant protein of the present invention) is used as an immunogen and is administered to a mammalian organism, such as a rat, rabbit, hamster or mouse. Either a full-length protein, an antigenic peptide fragment (e.g., a peptide fragment containing a region that varies between a variant protein and a corresponding wild-type protein), or a fusion protein can be used. A protein used as an immunogen may be naturally-occurring, synthetic or recombinantly produced, and may be administered in combination with an adjuvant, including but not limited to, Freund's (complete and incomplete), mineral gels such as aluminum hydroxide, surface active substance such as lysolecithin, pluronic polyols, polyanions, peptides, oil emulsions, keyhole limpet hemocyanin, dinitrophenol, and the like.

[0384] Monoclonal antibodies can be produced by hybridoma technology, which immortalizes cells secreting a specific monoclonal antibody. Kohler and Milstein, Nature 256:495 (1975). The immortalized cell lines can be created in vitro by fusing two different cell types, typically lymphocytes, and tumor cells. The hybridoma cells may be cultivated in vitro or in vivo. Additionally, fully human antibodies can be generated by transgenic animals. He et al., J Immunol 169:595 (2002). Fd phage and Fd phagemid technologies may be used to generate and select recombinant antibodies in vitro. Hoogenboom and Chames, Immunol Today 21:371 (2000); Liu et al., J Mol Biol 315:1063 (2002). The complementarity-determining regions of an antibody can be identified, and synthetic peptides corresponding to such regions may be used to mediate antigen binding. U.S. Pat. No. 5,637,677.

[0385] Antibodies are preferably prepared against regions or discrete fragments of a variant protein containing a variant amino acid sequence as compared to the corresponding wild-type protein (e.g., a region of a variant protein that includes an amino acid encoded by a nonsynonymous cSNP, a region affected by truncation caused by a nonsense SNP that creates a stop codon, or a region resulting from the destruction of a stop codon due to read-through mutation caused by a SNP). Furthermore, preferred regions will include those involved in function/activity and/or protein/binding partner interaction. Such fragments can be selected on a physical property, such as fragments corresponding to regions that are located on the surface of the protein, e.g., hydrophilic regions, or can be selected based on sequence uniqueness, or based on the position of the variant amino acid residue(s) encoded by the SNPs provided by the present invention. An antigenic fragment will typically comprise at least about 8-10 contiguous amino acid residues in which at least one of the amino acid residues is an amino acid affected by a SNP disclosed herein. The antigenic peptide can comprise, however, at least 12, 14, 16, 20, 25, 50, 100 (or any other number in-between) or more amino acid residues, provided that at least one amino acid is affected by a SNP disclosed herein. Detection of an antibody of the present invention can be facilitated by coupling (i.e., physically linking) the antibody or an antigen-reactive fragment thereof to a detectable substance. Detectable substances include, but are not limited to, various enzymes, prosthetic groups, fluorescent materials, luminescent materials, bioluminescent materials, and radioactive materials. Examples of suitable enzymes include horseradish peroxidase, alkaline phosphatase, β-galactosidase, or acetylcholinesterase; examples of suitable prosthetic group complexes include streptavidin/biotin and avidin/biotin; examples of suitable fluorescent materials include umbelliferone, fluorescein, fluorescein isothiocyanate, rhodamine, dichlorotriazinylamine fluorescein, dansyl chloride or phycoerythrin; an example of a luminescent material includes luminol; examples of bioluminescent materials include luciferase, luciferin, and aequorin, and examples of suitable radioactive material include ¹²⁵I, ¹³¹I, ³⁵S or ³H.

[0386] Antibodies, particularly the use of antibodies as therapeutic agents, are reviewed in: Morgan, “Antibody therapy for Alzheimer's disease,” Expert Rev Vaccines (1):53-9 (February 2003); Ross et al., “Anticancer antibodies,” Am J Clin Pathol 119(4):472-85 (April 2003); Goldenberg, “Advancing role of radiolabeled antibodies in the therapy of cancer,” Cancer Immunol Immunother 52(5):281-96 (May 2003); Epub Mar. 11, 2003; Ross et al., “Antibody-based therapeutics in oncology,” Expert Rev Anticancer Ther 3(1):107-21 (February 2003); Cao et al., “Bispecific antibody conjugates in therapeutics,” Adv Drug Deliv Rev 55(2):171-97 (February 2003); von Mehren et al., “Monoclonal antibody therapy for cancer,” Annu Rev Med 54:343-69 (2003); Epub Dec. 3, 2001; Hudson et al., “Engineered antibodies,” Nat Med 9(1):129-34 (January 2003); Brekke et al., “Therapeutic antibodies for human diseases at the dawn of the twenty-first century,” Nat Rev Drug Discov 2(1):52-62 (January 2003); Erratum in: Nat Rev Drug Discov 2(3):240 (March 2003); Houdebine, “Antibody manufacture in transgenic animals and comparisons with other systems,” Curr Opin Biotechnol 13(6):625-9 (December 2002); Andreakos et al., “Monoclonal antibodies in immune and inflammatory diseases,” Curr Opin Biotechnol 13(6):615-20 (December 2002); Kellermann et al., “Antibody discovery: the use of transgenic mice to generate human monoclonal antibodies for therapeutics,” Curr Opin Biotechnol 13(6):593-7 (December 2002); Pini et al., “Phage display and colony filter screening for high-throughput selection of antibody libraries,” Comb Chem High Throughput Screen 5(7):503-10 (November 2002); Batra et al., “Pharmacokinetics and biodistribution of genetically engineered antibodies,” Curr Opin Biotechnol 13(6):603-8 (December 2002); and Tangri et al., “Rationally engineered proteins or antibodies with absent or reduced immunogenicity,” Curr Med Chem 9(24):2191-9 (December 2002).

[0387] Uses of Antibodies

[0388] Antibodies can be used to isolate the variant proteins of the present invention from a natural cell source or from recombinant host cells by standard techniques, such as affinity chromatography or immunoprecipitation. In addition, antibodies are useful for detecting the presence of a variant protein of the present invention in cells or tissues to determine the pattern of expression of the variant protein among various tissues in an organism and over the course of normal development or disease progression. Further, antibodies can be used to detect variant protein in situ, in vitro, in a bodily fluid, or in a cell lysate or supernatant in order to evaluate the amount and pattern of expression. Also, antibodies can be used to assess abnormal tissue distribution, abnormal expression during development, or expression in an abnormal condition, such as MI. Additionally, antibody detection of circulating fragments of the full-length variant protein can be used to identify turnover.

[0389] Antibodies to the variant proteins of the present invention are also useful in pharmacogenomic analysis. Thus, antibodies against variant proteins encoded by alternative SNP alleles can be used to identify individuals that require modified treatment modalities.

[0390] Further, antibodies can be used to assess expression of the variant protein in disease states such as in active stages of the disease or in an individual with a predisposition to a disease related to the protein's function, particularly MI. Antibodies specific for a variant protein encoded by a SNP-containing nucleic acid molecule of the present invention can be used to assay for the presence of the variant protein, such as to screen for predisposition to MI as indicated by the presence of the variant protein.

[0391] Antibodies are also useful as diagnostic tools for evaluating the variant proteins in conjunction with analysis by electrophoretic mobility, isoelectric point, tryptic peptide digest, and other physical assays well known in the art.

[0392] Antibodies are also useful for tissue typing. Thus, where a specific variant protein has been correlated with expression in a specific tissue, antibodies that are specific for this protein can be used to identify a tissue type.

[0393] Antibodies can also be used to assess aberrant subcellular localization of a variant protein in cells in various tissues. The diagnostic uses can be applied, not only in genetic testing, but also in monitoring a treatment modality. Accordingly, where treatment is ultimately aimed at correcting the expression level or the presence of variant protein or aberrant tissue distribution or developmental expression of a variant protein, antibodies directed against the variant protein or relevant fragments can be used to monitor therapeutic efficacy.

[0394] The antibodies are also useful for inhibiting variant protein function, for example, by blocking the binding of a variant protein to a binding partner. These uses can also be applied in a therapeutic context in which treatment involves inhibiting a variant protein's function. An antibody can be used, for example, to block or competitively inhibit binding, thus modulating (agonizing or antagonizing) the activity of a variant protein. Antibodies can be prepared against specific variant protein fragments containing sites required for function or against an intact variant protein that is associated with a cell or cell membrane. For in vivo administration, an antibody may be linked with an additional therapeutic payload such as a radionuclide, an enzyme, an immunogenic epitope, or a cytotoxic agent. Suitable cytotoxic agents include, but are not limited to, bacterial toxin such as diphtheria, and plant toxin such as ricin. The in vivo half-life of an antibody or a fragment thereof may be lengthened by pegylation through conjugation to polyethylene glycol. Leong et al., Cytokine 16:106 (2001).

[0395] The invention also encompasses kits for using antibodies, such as kits for detecting the presence of a variant protein in a test sample. An exemplary kit can comprise antibodies such as a labeled or labelable antibody and a compound or agent for detecting variant proteins in a biological sample; means for determining the amount, or presence/absence of variant protein in the sample; means for comparing the amount of variant protein in the sample with a standard; and instructions for use.

[0396] Vectors and Host Cells

[0397] The present invention also provides vectors containing the SNP-containing nucleic acid molecules described herein. The term “vector” refers to a vehicle, preferably a nucleic acid molecule, which can transport a SNP-containing nucleic acid molecule. When the vector is a nucleic acid molecule, the SNP-containing nucleic acid molecule can be covalently linked to the vector nucleic acid. Such vectors include, but are not limited to, a plasmid, single or double stranded phage, a single or double stranded RNA or DNA viral vector, or artificial chromosome, such as a BAC, PAC, YAC, or MAC.

[0398] A vector can be maintained in a host cell as an extrachromosomal element where it replicates and produces additional copies of the SNP-containing nucleic acid molecules. Alternatively, the vector may integrate into the host cell genome and produce additional copies of the SNP-containing nucleic acid molecules when the host cell replicates.

[0399] The invention provides vectors for the maintenance (cloning vectors) or vectors for expression (expression vectors) of the SNP-containing nucleic acid molecules. The vectors can function in prokaryotic or eukaryotic cells or in both (shuttle vectors).

[0400] Expression vectors typically contain cis-acting regulatory regions that are operably linked in the vector to the SNP-containing nucleic acid molecules such that transcription of the SNP-containing nucleic acid molecules is allowed in a host cell. The SNP-containing nucleic acid molecules can also be introduced into the host cell with a separate nucleic acid molecule capable of affecting transcription. Thus, the second nucleic acid molecule may provide a trans-acting factor interacting with the cis-regulatory control region to allow transcription of the SNP-containing nucleic acid molecules from the vector. Alternatively, a trans-acting factor may be supplied by the host cell. Finally, a trans-acting factor can be produced from the vector itself. It is understood, however, that in some embodiments, transcription and/or translation of the nucleic acid molecules can occur in a cell-free system.

[0401] The regulatory sequences to which the SNP-containing nucleic acid molecules described herein can be operably linked include promoters for directing mRNA transcription. These include, but are not limited to, the left promoter from bacteriophage λ, the lac, TRP, and TAC promoters from E. coli, the early and late promoters from SV40, the CMV immediate early promoter, the adenovirus early and late promoters, and retrovirus long-terminal repeats.

[0402] In addition to control regions that promote transcription, expression vectors may also include regions that modulate transcription, such as repressor binding sites and enhancers. Examples include the SV40 enhancer, the cytomegalovirus immediate early enhancer, polyoma enhancer, adenovirus enhancers, and retrovirus LTR enhancers.

[0403] In addition to containing sites for transcription initiation and control, expression vectors can also contain sequences necessary for transcription termination and, in the transcribed region, a ribosome-binding site for translation. Other regulatory control elements for expression include initiation and termination codons as well as polyadenylation signals. A person of ordinary skill in the art would be aware of the numerous regulatory sequences that are useful in expression vectors. See, e.g., Sambrook and Russell, Molecular Cloning: A Laboratory Manual, Cold Spring Harbor Laboratory Press, N.Y. (2000).

[0404] A variety of expression vectors can be used to express a SNP-containing nucleic acid molecule. Such vectors include chromosomal, episomal, and virus-derived vectors, for example, vectors derived from bacterial plasmids, from bacteriophage, from yeast episomes, from yeast chromosomal elements, including yeast artificial chromosomes, from viruses such as baculoviruses, papovaviruses such as SV40, Vaccinia viruses, adenoviruses, poxviruses, pseudorabies viruses, and retroviruses. Vectors can also be derived from combinations of these sources such as those derived from plasmid and bacteriophage genetic elements, e.g., cosmids and phagemids. Appropriate cloning and expression vectors for prokaryotic and eukaryotic hosts are described in Sambrook and Russell, Molecular Cloning: A Laboratory Manual, Cold Spring Harbor Laboratory Press, N.Y. (2000).

[0405] The regulatory sequence in a vector may provide constitutive expression in one or more host cells (e.g., tissue specific expression) or may provide for inducible expression in one or more cell types such as by temperature, nutrient additive, or exogenous factor, e.g., a hormone or other ligand. A variety of vectors that provide constitutive or inducible expression of a nucleic acid sequence in prokaryotic and eukaryotic host cells are well known to those of ordinary skill in the art.

[0406] A SNP-containing nucleic acid molecule can be inserted into the vector by methodology well-known in the art. Generally, the SNP-containing nucleic acid molecule that will ultimately be expressed is joined to an expression vector by cleaving the SNP-containing nucleic acid molecule and the expression vector with one or more restriction enzymes and then ligating the fragments together. Procedures for restriction enzyme digestion and ligation are well known to those of ordinary skill in the art.

[0407] The vector containing the appropriate nucleic acid molecule can be introduced into an appropriate host cell for propagation or expression using well-known techniques. Bacterial host cells include, but are not limited to, Escherichia coli, Streptomyces spp., and Salmonella typhimurium. Eukaryotic host cells include, but are not limited to, yeast, insect cells such as Drosophila spp., animal cells such as COS and CHO cells, and plant cells.

[0408] As described herein, it may be desirable to express the variant peptide as a fusion protein. Accordingly, the invention provides fusion vectors that allow for the production of the variant peptides. Fusion vectors can, for example, increase the expression of a recombinant protein, increase the solubility of the recombinant protein, and aid in the purification of the protein by acting, for example, as a ligand for affinity purification. A proteolytic cleavage site may be introduced at the junction of the fusion moiety so that the desired variant peptide can ultimately be separated from the fusion moiety. Proteolytic enzymes suitable for such use include, but are not limited to, factor Xa, thrombin, and enterokinase. Typical fusion expression vectors include pGEX (Smith et al., Gene 67:31-40 (1988)), pMAL (New England Biolabs, Beverly, Mass.) and pRIT5 (Pharmacia, Piscataway, N.J.) which fuse glutathione S-transferase (GST), maltose E binding protein, or protein A, respectively, to the target recombinant protein. Examples of suitable inducible non-fusion E. coli expression vectors include pTrc (Amann et al., Gene 69:301-315 (1988)) and pET 11d (Studier et al., Gene Expression Technology: Methods in Enzymology 185:60-89 (1990)).

[0409] Recombinant protein expression can be maximized in a bacterial host by providing a genetic background wherein the host cell has an impaired capacity to proteolytically cleave the recombinant protein (S. Gottesman, Gene Expression Technology: Methods in Enzymology 185:119-128, Academic Press, Calif. (1990)). Alternatively, the sequence of the SNP-containing nucleic acid molecule of interest can be altered to provide preferential codon usage for a specific host cell, for example, E. coli. Wada et al., Nucleic Acids Res 20:2111-2118 (1992).

[0410] The SNP-containing nucleic acid molecules can also be expressed by expression vectors that are operative in yeast. Examples of vectors for expression in yeast (e.g., S. cerevisiae) include pYepSec1 (Baldari et al., EMBO J. 6:229-234 (1987)), pMFa (Kujan et al., Cell 30:933-943 (1982)), pJRY88 (Schultz et al., Gene 54:113-123 (1987)), and pYES2 (Invitrogen Corporation, San Diego, Calif.).

[0411] The SNP-containing nucleic acid molecules can also be expressed in insect cells using, for example, baculovirus expression vectors. Baculovirus vectors available for expression of proteins in cultured insect cells (e.g., Sf 9 cells) include the pAc series (Smith et al., Mol Cell Biol 3:2156-2165 (1983)) and the pVL series (Lucklow et al., Virology 170:31-39 (1989)).

[0412] In certain embodiments of the invention, the SNP-containing nucleic acid molecules described herein are expressed in mammalian cells using mammalian expression vectors. Examples of mammalian expression vectors include pCDM8 (B. Seed, Nature 329:840 (1987)) and pMT2PC (Kaufman et al., EMBO J. 6:187-195 (1987)).

[0413] The invention also encompasses vectors in which the SNP-containing nucleic acid molecules described herein are cloned into the vector in reverse orientation, but operably linked to a regulatory sequence that permits transcription of antisense RNA. Thus, an antisense transcript can be produced to the SNP-containing nucleic acid sequences described herein, including both coding and non-coding regions. Expression of this antisense RNA is subject to each of the parameters described above in relation to expression of the sense RNA (regulatory sequences, constitutive or inducible expression, tissue-specific expression).

[0414] The invention also relates to recombinant host cells containing the vectors described herein. Host cells therefore include, for example, prokaryotic cells, lower eukaryotic cells such as yeast, other eukaryotic cells such as insect cells, and higher eukaryotic cells such as mammalian cells.

[0415] The recombinant host cells can be prepared by introducing the vector constructs described herein into the cells by techniques readily available to persons of ordinary skill in the art. These include, but are not limited to, calcium phosphate transfection, DEAE-dextran-mediated transfection, cationic lipid-mediated transfection, electroporation, transduction, infection, lipofection, and other techniques such as those described in Sambrook and Russell, Molecular Cloning: A Laboratory Manual, Cold Spring Harbor Laboratory, Cold Spring Harbor Laboratory Press, N.Y. (2000).

[0416] Host cells can contain more than one vector. Thus, different SNP-containing nucleotide sequences can be introduced in different vectors into the same cell. Similarly, the SNP-containing nucleic acid molecules can be introduced either alone or with other nucleic acid molecules that are not related to the SNP-containing nucleic acid molecules, such as those providing trans-acting factors for expression vectors. When more than one vector is introduced into a cell, the vectors can be introduced independently, co-introduced, or joined to the nucleic acid molecule vector.

[0417] In the case of bacteriophage and viral vectors, these can be introduced into cells as packaged or encapsulated virus by standard procedures for infection and transduction. Viral vectors can be replication-competent or replication-defective. In the case in which viral replication is defective, replication can occur in host cells that provide functions that complement the defects.

[0418] Vectors generally include selectable markers that enable the selection of the subpopulation of cells that contain the recombinant vector constructs. The marker can be inserted in the same vector that contains the SNP-containing nucleic acid molecules described herein or may be in a separate vector. Markers include, for example, tetracycline or ampicillin-resistance genes for prokaryotic host cells, and dihydrofolate reductase or neomycin resistance genes for eukaryotic host cells. However, any marker that provides selection for a phenotypic trait can be effective.

[0419] While the mature variant proteins can be produced in bacteria, yeast, mammalian cells, and other cells under the control of the appropriate regulatory sequences, cell-free transcription and translation systems can also be used to produce these variant proteins using RNA derived from the DNA constructs described herein.

[0420] Where secretion of the variant protein is desired, which is difficult to achieve with multi-transmembrane domain containing proteins such as G-protein-coupled receptors (GPCRs), appropriate secretion signals can be incorporated into the vector. The signal sequence can be endogenous to the peptides or heterologous to these peptides.

[0421] Where the variant protein is not secreted into the medium, the protein can be isolated from the host cell by standard disruption procedures, including freeze/thaw, sonication, mechanical disruption, use of lysing agents, and the like. The variant protein can then be recovered and purified by well-known purification methods including, for example, ammonium sulfate precipitation, acid extraction, anion or cationic exchange chromatography, phosphocellulose chromatography, hydrophobic-interaction chromatography, affinity chromatography, hydroxylapatite chromatography, lectin chromatography, or high performance liquid chromatography.

[0422] It is also understood that, depending upon the host cell in which recombinant production of the variant proteins described herein occurs, they can have various glycosylation patterns, or may be non-glycosylated, as when produced in bacteria. In addition, the variant proteins may include an initial modified methionine in some cases as a result of a host-mediated process.

[0423] For further information regarding vectors and host cells, see Current Protocols in Molecular Biology, John Wiley & Sons, N.Y.

[0424] Uses of Vectors and Host Cells, and Transgenic Animals

[0425] Recombinant host cells that express the variant proteins described herein have a variety of uses. For example, the cells are useful for producing a variant protein that can be further purified into a preparation of desired amounts of the variant protein or fragments thereof. Thus, host cells containing expression vectors are useful for variant protein production.

[0426] Host cells are also useful for conducting cell-based assays involving the variant protein or variant protein fragments, such as those described above as well as other formats known in the art. Thus, a recombinant host cell expressing a variant protein is useful for assaying compounds that stimulate or inhibit variant protein function. Such an ability of a compound to modulate variant protein function may not be apparent from assays of the compound on the native/wild-type protein, or from cell-free assays of the compound. Recombinant host cells are also useful for assaying functional alterations in the variant proteins as compared with a known function.

[0427] Genetically-engineered host cells can be further used to produce non-human transgenic animals. A transgenic animal is preferably a non-human mammal, for example, a rodent, such as a rat or mouse, in which one or more of the cells of the animal include a transgene. A transgene is exogenous DNA containing a SNP of the present invention which is integrated into the genome of a cell from which a transgenic animal develops and which remains in the genome of the mature animal in one or more of its cell types or tissues. Such animals are useful for studying the function of a variant protein in vivo, and identifying and evaluating modulators of variant protein activity. Other examples of transgenic animals include, but are not limited to, non-human primates, sheep, dogs, cows, goats, chickens, and amphibians. Transgenic non-human mammals such as cows and goats can be used to produce variant proteins which can be secreted in the animal's milk and then recovered.

[0428] A transgenic animal can be produced by introducing a SNP-containing nucleic acid molecule into the male pronuclei of a fertilized oocyte, e.g., by microinjection or retroviral infection, and allowing the oocyte to develop in a pseudopregnant female foster animal. Any nucleic acid molecules that contain one or more SNPs of the present invention can potentially be introduced as a transgene into the genome of a non-human animal.

[0429] Any of the regulatory or other sequences useful in expression vectors can form part of the transgenic sequence. This includes intronic sequences and polyadenylation signals, if not already included. A tissue-specific regulatory sequence(s) can be operably linked to the transgene to direct expression of the variant protein in particular cells or tissues.

[0430] Methods for generating transgenic animals via embryo manipulation and microinjection, particularly animals such as mice, have become conventional in the art and are described, for example, in U.S. Pat. Nos. 4,736,866 and 4,870,009, both by Leder et al.; U.S. Pat. No. 4,873,191 by Wagner et al., and in B. Hogan, Manipulating the Mouse Embryo, Cold Spring Harbor Laboratory Press, N.Y. (1986). Similar methods are used for production of other transgenic animals. A transgenic founder animal can be identified based upon the presence of the transgene in its genome and/or expression of transgenic mRNA in tissues or cells of the animals. A transgenic founder animal can then be used to breed additional animals carrying the transgene. Moreover, transgenic animals carrying a transgene can further be bred to other transgenic animals carrying other transgenes. A transgenic animal also includes a non-human animal in which the entire animal or tissues in the animal have been produced using the homologously recombinant host cells described herein.

[0431] In another embodiment, transgenic non-human animals can be produced which contain selected systems that allow for regulated expression of the transgene. One example of such a system is the cre/loxP recombinase system of bacteriophage P1. Lakso et al., PNAS 89:6232-6236 (1992). Another example of a recombinase system is the FLP recombinase system of S. cerevisiae. O'Gorman et al., Science 251:1351-1355 (1991). If a cre/loxP recombinase system is used to regulate expression of the transgene, animals containing transgenes encoding both the Cre recombinase and a selected protein are generally needed. Such animals can be provided through the construction of “double” transgenic animals, e.g., by mating two transgenic animals, one containing a transgene encoding a selected variant protein and the other containing a transgene encoding a recombinase.

[0432] Clones of the non-human transgenic animals described herein can also be produced according to the methods described, for example, in I. Wilmut et al., Nature 385:810-813 (1997) and PCT International Publication Nos. WO 97/07668 and WO 97/07669. In brief, a cell (e.g., a somatic cell) from the transgenic animal can be isolated and induced to exit the growth cycle and enter Go phase. The quiescent cell can then be fused, e.g., through the use of electrical pulses, to an enucleated oocyte from an animal of the same species from which the quiescent cell is isolated. The reconstructed oocyte is then cultured such that it develops to morula or blastocyst and then transferred to pseudopregnant female foster animal. The offspring born of this female foster animal will be a clone of the animal from which the cell (e.g., a somatic cell) is isolated.

[0433] Transgenic animals containing recombinant cells that express the variant proteins described herein are useful for conducting the assays described herein in an in vivo context. Accordingly, the various physiological factors that are present in vivo and that could influence ligand or substrate binding, variant protein activation, signal transduction, or other processes or interactions, may not be evident from in vitro cell-free or cell-based assays. Thus, non-human transgenic animals of the present invention may be used to assay in vivo variant protein function as well as the activities of a therapeutic agent or compound that modulates variant protein function/activity or expression. Such animals are also suitable for assessing the effects of null mutations (i.e., mutations that substantially or completely eliminate one or more variant protein functions).

[0434] For further information regarding transgenic animals, see Houdebine, “Antibody manufacture in transgenic animals and comparisons with other systems,” Curr Opin Biotechnol 13(6):625-9 (December 2002); Petters et al., “Transgenic animals as models for human disease,” Transgenic Res 9(4-5):347-51, discussion 345-6 (2000); Wolf et al., “Use of transgenic animals in understanding molecular mechanisms of toxicity,” J Pharm Pharmacol 50(6):567-74 (June 1998); Echelard, “Recombinant protein production in transgenic animals,” Curr Opin Biotechnol 7(5):536-40 (October 1996); Houdebine, “Transgenic animal bioreactors,” Transgenic Res 9(4-5):305-20 (2000); Pirity et al., “Embryonic stem cells, creating transgenic animals,” Methods Cell Biol 57:279-93 (1998); and Robl et al., “Artificial chromosome vectors and expression of complex proteins in transgenic animals,” Theriogenology 59(1):107-13 (January 2003).

### EXAMPLES

[0435] The following example is offered to illustrate, but not limit, the claimed invention.

### Example 1

### Statistical Analysis of SNP Allelic and Genotypic Association with Early-Onset MI Risk

[0436] Design and Strategy

[0437] Three case-control studies were performed to identify genetic polymorphisms associated with early-onset MI. Cases had a history of early-onset MI as described below, based on age at which the first MI occurred. Controls had no history of MI. Excluded were young controls because of the possibility of their experiencing an early-onset MI shortly after recruitment. The first two case-control studies (Study 1 and Study 2) identified SNPs putatively associated with early-onset MI, based on genotyping pooled DNA samples. The belief that these SNPs are associated with early-onset MI was tested in Study 3, by genotyping individual DNA samples.

[0438] DNA was extracted from blood samples at CCF or UCSF using conventional DNA extraction methods or commercially available kits, such as the QIA-amp kit from Qiagen (Valencia, Calif.), according to the manufacturer's suggestions. Over 11,000 SNP markers were analyzed in the extracted DNA by genotyping using a PRISM® 7900HT Sequence Detection System (Applied Biosystems, Foster City, Calif.) by allele-specific PCR. For pooled genotyping, DNA samples from about 50 individuals from each sample set were pooled and the allele frequencies for specific markers were obtained by kinetic PCR, similar to the method described by S. Germer et al. Genome Research 10:258-266 (2000). PCR primers used to genotype the SNP markers in this example are shown in Table 3 and Table 4, with their corresponding SNP markers identified by hCV. DNA concentrations of the various samples were standardized.

[0439] All subjects in all three studies gave informed consent and completed an Institutional Review Board approved questionnaire. Participants in Study 1 were patients of the Cleveland Clinic Foundation (CCF) Heart Center who had undergone diagnostic or interventional cardiac catheterization between July, 2001 and March, 2003 and enrolled in the Genebank at Cleveland Clinic Study. At the time of enrollment in the study or the time of their MI, if known, female cases were below age 63 and male cases were below age 58. All controls were older than age 63 for females or 58 for males. A history of MI was verified by electrocardiogram, cardiac enzymes or perfusion imaging. Controls had less than 50% coronary luminal narrowing. Each participant in Study 1 selected Northern or Eastern European, or “other Caucasian” as the description of both his/her mother and father on the enrollment questionnaire.

[0440] Participants in Study 2 and Study 3 were enrolled by the University of California, San Francisco (UCSF) Genomic Resource in Arteriosclerosis. Cases in Study 2 and Study 3 included patients who had undergone diagnostic or interventional cardiac catheterization, and patients of the UCSF Lipid Clinic. Controls were enrolled by the UCSF Genomic Resource in Arteriosclerosis and included UCSF staff, patients of UCSF Clinics, and senior citizens who participated in physical activities at regional community centers and events for senior citizens.

[0441] The cases in Study 2 and Study 3 suffered their first MI before the age of 55 for males, and below the age of 60 for females. A history of MI for Study 2 cases was verified by a clinical chart review or by The International Classification of Diseases, 9^{th} Revision (ICD9), codes 410 or 411. MI status for 57% of Study 3 cases was initially determined by a self-reported history of MI. To characterize the accuracy of these self-reported histories, medical record review for a sample of Study 3 cases resulted in verification of the self-reported MI status for 98% of the sample (verification by electrocardiogram, cardiac enzymes or imaging). Controls had no history of MI, diabetes or symptomatic vascular disease. In Study 2, male controls were older than 65 and female controls older than 60; these controls had no known first-degree relative with a history of symptomatic coronary disease prior to age 65. In Study 3, male controls were older than 60, while female controls were older than 65. All subjects of Study 2 and Study 3 chose “Caucasian” as their ethnicity in response to a multiple-choice questionnaire.

[0442] Statistical Analysis

[0443] Association of MI status with allele frequency was initially assessed by the two-tailed χ² test for pooed genotyping of Studies 1 and 2, then by logistic regression (Wald test) in Study 3; MI status with genotype was assessed by multiple logistic regression. Then in Study 3, where one prespecified risk allele was tested for each SNP, only the one-sided P values and ninety percent confidence intervals are presented (for odds ratios greater than one, there is 95% confidence that a true risk estimate is greater than the lower bound of a 90% confidence interval).

[0444] Tagging SNPs that were used in the analysis of LD SNPs' association with MI (see Table 7) were selected by pairwise tagging using Tagger (P. I. de Bakker et al., “Efficiency and power in genetic association studies,” Nat Genet. 37:1217-1223 (2005)), as implemented in Haploview (J. C. Barrett et al., “Haploview: analysis and visualization of LD and haplotype maps,” Bioinformatics 21:263-265 (2005)).

[0445] Results

[0446] In Study 1, the allele frequencies of over 11,000 SNPs were determined. These SNPs are located in over 7,000 genes. The majority of these SNPs are missense or nonsense mutations, or modify acceptor and donor splice sites; for this reason they have the potential to affect gene function or expression. Other SNPs are located in transcription factor binding sites or in untranslated regions of mRNA, which could affect mRNA expression or stability. Most of the SNPs studied have minor allele frequencies greater than 5% (in Caucasians).

[0447] An analysis as to which of these SNPs were associated with early-onset MI was performed by comparing allele frequencies between cases and controls in pooled DNA samples. A total of 666 SNPs were found to be associated with early-onset MI in Study 1 by allelic association (P value<0.05). “Allelic” associations were calculated by comparing case-control frequencies of individuals with the risk allele vs. those without. In Study 2, these 666 SNPs were again tested for allelic association with early-onset MI in pooled DNA samples, and the 16 SNPs that had the lowest P values (all<0.022) were selected for further study. Six SNPs that were found to be associated with early-onset MI in the pooled genotyping analyses of Studies 1 and 2 are shown in Table 5 (P value<0.05, the same risk allele in both studies). As an example, the T allele of the missense mutation (SNP) hCV25753038 in gene AQP10 was shown to be associated with early-onset MI in the pooled genotyping analysis of Study 1, with an odds ratio (OR) of 1.37 and a P value of 0.042 (Table 5). This same allele was shown in Study 2 to be associated with early-onset MI, with an OR of 1.32 and P value of 0.008.

[0448] This and all other SNP markers described herein may also be found in Tables 1 and 2. In Table 1, context sequence information is provided regarding the transcript in which each SNP is found, if it resides in a transcript. For example, in Table 1, the SNP marker, Celera SNP ID hCV25753038 (whose transcript context sequence is SEQ ID NO: 63), is found in the transcript sequence of SEQ ID 14 (Table 1). Also provided in Table 1 is other information regarding the transcript in which the SNP is located: the gene symbol, AQP10; position of the SNP in the transcript, at base 407; the chromosome, 1; the Public SNP ID (i.e. the rs number, or RefSNP, from the National Center for Biotechnology Information SNP database, where known), rs6685323; SNP type, Missense Mutation, etc. In Table 2 is provided genomic sequence information for all SNP markers described herein. For example Celera SNP ID hCV25753038 (with genomic context sequence SEQ ID NO: 142) is found in the genomic sequence of SEQ ID 78 (Table 2). Sometimes, the same SNP is found in more than one context sequence. For example, the above mentioned SNP, hCV25753038 is also found in genomic context sequence of SEQ ID NO: 146, which is included in the genomic sequence of SEQ ID NO: 79.

[0449] In the event that there are SNPs calculated to be in LD with the interrogated SNP, that information is also provided in Tables 1 and 2. For example, see SEQ ID NO: 147 in Table 2, where the Celera SNP ID for the LD SNP is hCV25618512, and it is in LD with the interrogated SNPs hCV25618493 and hCV25753038 (both at power of 0.8).

[0450] The genotypes of these six SNPs were then determined in the individual DNA samples of Study 1 and Study 2, to further confirm the early-onset MI associations obtained from pooled DNA genotyping. The risk associated with each genotype of the six SNPs was calculated using the risk allele prespecified in Studies 1 and 2. Each SNP was tested in the genotypic model of association; i.e., dominant or recessive. The genotypic associations of the individual genotyping for these six SNPs in Study 3 are shown in Table 6. Odds ratios and P values were determined for each genotype shown, based on a comparison of cases and controls of that genotype with individuals of the non-risk homozygous genotype.

[0451] For each association shown in Table 6, individuals homozygous or heterozygous for the risk allele are compared to individuals homozygous for the non-risk allele. As an example, individuals homozygous for the risk allele for hCV25753038 (AQP10) showed an OR of 2.83 and P value of 0.0007 for association with early-onset MI, relative to individuals homozygous for the non-risk allele. Individuals heterozygous for the risk allele of hCV2091644 (VAMP8) showed an OR of 1.35 and P value of 0.070 for association with early-onset MI, relative to non-risk homozygous individuals. Individuals homozygous for this risk allele also showed a possible association with early-onset MI (OR of 1.23), but a P value of 0.22. This relatively high P value is most likely due to a lack of power in this sample set based on the relatively low number of samples homozygous for either allele for this SNP.

[0452] Individuals homozygous for the risk allele of hCV7818335 (HNRPUL1) and hCV8780857 (EGFL7) could not be compared to non-risk homozygous individuals, because there were too few samples of that genotype to calculate reliable OR and P values. In the case of the EGFL7 SNP, there were no case samples with the “AA” non-risk genotype; in the HNRPUL1 SNP, only four individuals had the “TT” non-risk genotype. For these SNPs, the OR and P values were calculated by comparing cases and controls of the homozygous risk allele individuals with heterozygous individuals.

[0453] The OR and P values for these six SNPs were calculated by allelic and genotypic (dominant/recessive) association, and the best risk association model for each SNP is shown in Table 7; i.e., the model showing the strongest correlation between genotype and early-onset MI risk. “Dominant” genotypic associations were calculated by comparing case-control frequencies in heterozygous and risk-allele homozygous individuals with non-risk-allele homozygous individuals. “Recessive” genotypic associations were calculated by comparing case-control frequencies in risk-allele homozygous individuals with heterozygous and non-risk-allele homozygous individuals. “Allelic” associations were calculated by comparing case-control frequencies of individuals with the risk allele vs. those without. The SNP marker hCV7818335 (HNRPUL1) is an example in which the recessive model applies: individuals with two copies of this SNP's risk allele showed an association with early-onset MI relative to individuals with one or no copies of the allele (OR 1.59, P value 0.011). The association of SNP hCV2091644 (VAMP8) is an example of the dominant model: individuals with one or two copies of the risk allele showed an association with early-onset MI relative to individuals with no copies (OR 1.32, P value 0.079). The association of SNP hCV8780857 (EGFL7) is an example of the allelic model: the risk allele is more highly represented in cases with early-onset MI than in controls (OR 1.33, P value 0.08).

[0454] Eleven additional SNPs in the ˜80 kb region surrounding the VAMP8 SNP were investigated for early-onset MI association (VAMP8 SNP=hCV2091644, which was here re-analyzed). Samples from Study 2, which contains the largest number of samples, were used for this analysis. Of the eleven SNPs analyzed, six were shown to be associated with early-onset MI (Table 8, P value

[0455] <0.10) by allelic association. Seven SNPs in the 110 kb region surrounding the HNRPUL1 SNP were also investigated for early-onset MI association using the Study 2 sample set (HNRPUL1 SNP=hCV7818335, which was here re-analyzed). Those five SNPs associated with early-onset MI by allelic association are shown in Table 8.

[0456] For ease of reference, the chart below shows, as an example, the Celera SNP ID of some of the SNPs disclosed in the present invention and their corresponding rs numbers.

| SNP ID | rs number |
|---|---|
| hCV1036123 | rs699664 |
| hCV11677037 | rs11078312 |
| hCV11707934 | rs4802113 |
| hCV2091643 | rs1058588 |
| hCV2091644 | rs1010 |
| hCV2091655 | rs719023 |
| hCV2152706 | rs2044475 |
| hCV25618493 | rs6668968 |
| hCV25753038 | rs6685323 |
| hCV3225041 | rs2028898 |
| hCV7818113 | rs12978323 |
| hCV7818335 | rs11881940 |
| hCV7818385 | rs6957 |
| hCV7818394 | rs12981053 |
| hCV8780857 | rs1051828 |

### Example 2

### Additional SNPs in LD with CHD-Associated Interrogated SNP Markers

[0457] Another investigation was conducted to identify SNP markers in linkage disequilibrium (LD) with SNPs which have been found to be associated with CHD, specifically early-onset MI as shown in Tables 5-8, using an algorithm. Briefly, the power threshold (T) was set at 70% for detecting disease association using LD markers. This power threshold is based on equation (31) above, which incorporates allele frequency data from previous disease association studies, the predicted error rate for not detecting truly disease-associated markers, and a significance level of 0.05. Using this power calculation and the sample size, for each interrogated SNP a threshold level of LD, or r² value, was derived (r_{T}², equations (32) and (33)). The threshold value r_{T}² is the minimum value of linkage disequilibrium between the interrogated SNP and its LD SNPs possible such that the non-interrogated SNP still retains a power greater or equal to T for detecting disease-association.

[0458] Based on the above methodology, LD SNPs were found for all interrogated SNPs shown in Tables 5-8. These LD SNPs are listed in Table 9; each is associated with its respective interrogated SNP. Also shown are the public SNP IDs (rs numbers) for interrogated and LD SNPs, the threshold r² value and the power used to determine this, and the r² value of linkage disequilibrium between the interrogated SNP and its matching LD SNP. As an example in Table 9, the interrogated, early-onset MI-associated SNP hCV2091643 was calculated to be in LD with hCV11504816 at an r² value of 0.97, based on a 51% power calculation.

[0459] One marker from Table 9 that was calculated by this algorithm to be in LD with a CHD-associated SNP was also analyzed for its association with early-onset MI (see the study description in Example 1, SNPs analyzed for early-onset MI association). SNP marker hCV2091643 is in calculated LD with marker hCV2091644, at an r² value of 1.00 (51% power). Data for this SNP marker is shown in Table 8 of Example 1. Both SNPs demonstrated an association with early-onset MI, with P values of approximately 0.02.

[0460] The SNPs herein described are good candidates for genetic analysis of an individual's risk for CHD, specifically MI. In particular, detection of these SNPs may be used to assess an individual's risk for developing early-onset MI, and genes containing such SNPs may be used as targets for therapeutic intervention.

[0461] All publications and patents cited in this specification are herein incorporated by reference in their entirety. Modifications and variations of the described compositions, methods and systems of the invention will be apparent to those skilled in the art without departing from the scope and spirit of the invention. Although the invention has been described in connection with specific preferred embodiments and certain working examples, it should be understood that the invention as claimed should not be unduly limited to such specific embodiments. Indeed, various modifications of the above-described modes for carrying out the invention that are obvious to those skilled in the field of molecular biology, genetics and related fields are intended to be within the scope of the following claims.

TABLE 3

| | | | |
|---|---|---|---|
| SNP ID | Alleles | Primer_1 | Primer_2 |

| | | | |
|---|---|---|---|
| hCV1036123 | C/T | GTCCTACTGCCCCCG | TGTCCTACTGCCCCCA |
| | | (SEQ ID NO: 188) | (SEQ ID NO: 189) |
| hCV11677037 | A/G | TGATGCAGCAGAACGT | GATGCAGCAGAACGC |
| | | (SEQ ID NO: 191) | (SEQ ID NO: 192) |
| hCV11707934 | C/T | AGGTTCCCATACCTATTCC | CAGGTTCCCATACCTATTCC |
| | | G | A |
| | | (SEQ ID NO: 194) | (SEQ ID NO: 195) |
| hCV2091643 | C/T | GGAGGGTTGTCCCTGAAG | GGAGGGTTGTCCCTGAAA |
| | | (SEQ ID NO: 197) | (SEQ ID NO: 198) |
| hCV2091644 | C/T | TTCTGGGGCATACAACG | CTTCTGGGGCATACAACA |
| | | (SEQ ID NO: 200) | (SEQ ID NO: 201) |
| hCV2091655 | C/T | AGAATGGCGTCTACCCAG | AGAATGGCGTCTACCCAA |
| | | (SEQ ID NO: 203) | (SEQ ID NO: 204) |
| hCV2152706 | C/T | CCTCAACATTAAACTTTAA | CCCTCAACATTAAACTTTAA |
| | | GCTCG | GCTCA |
| | | (SEQ ID NO: 206) | (SEQ ID NO: 207) |
| hCV25618493 | G/A | GGAGGCTGCGTATCC | AGGAGGCTGCGTATCT |
| | | (SEQ ID NO: 209) | (SEQ ID NO: 210) |
| hCV25753038 | T/C | GGAGCCACCTATGTTCTCT | GAGCCACCTATGTTCTCTAC |
| | | ACT | C |
| | | (SEQ ID NO: 212) | (SEQ ID NO: 213) |
| hCV3225041 | A/G | AACAGGAGTTTGAACTTG | AACAGGAGTTTGAACTTGGT |
| | | GTT | C |
| | | (SEQ ID NO: 215) | (SEQ ID NO: 216) |
| hCV7818113 | G/T | CCACCTTCCAAAGCTGTTG | CCACCTTCCAAAGCTGTTT |
| | | (SEQ ID NO: 218) | (SEQ ID NO: 219) |
| hCV7818335 | A/T | CCCGCCCTTCTGTCTA | CCCGCCCTTCTGTCTT |
| | | (SEQ ID NO: 221) | (SEQ ID NO: 222) |
| hCV7818385 | C/T | ACTCTTGGCTTTCTGAGAG | CACTCTTGGCTTTCTGAGAG |
| | | G | A |
| | | (SEQ ID NO: 224) | (SEQ ID NO: 225) |
| hCV7818394 | C/T | TTCTGAGCATGTTTGTCTA | GTATTCTGAGCATGTTTGTC |
| | | CG | TACA |
| | | (SEQ ID NO: 227) | (SEQ ID NO: 228) |
| hCV8780857 | A/G | GCTGGGGGTCCAGAAA | GCTGGGGGTCCAGAAG |
| | | (SEQ ID NO: 230) | (SEQ ID NO: 231) |

TABLE 4

| | | |
|---|---|---|
| SNP ID | Alleles | Common Primer |

| | | |
|---|---|---|
| hCV1036123 | C/T | CCCCGGCTCCTCTTATAC |
| | | (SEQ ID NO: 190) |
| hCV11677037 | A/G | TGCTACCCTCCTCCTCACTT |
| | | (SEQ ID NO: 193) |
| hCV11707934 | C/T | GGCGTGGCTGTGAATTGTG |
| | | (SEQ ID NO: 196) |
| hCV2091643 | C/T | GGTGGAAGAACGTGAAGATGATTGT |
| | | (SEQ ID NO: 199) |
| hCV2091644 | C/T | AGGGACAACCCTCCATAAA |
| | | (SEQ ID NO: 202) |
| hCV2091655 | C/T | CAGGTAGCTTGGTTACCCATTCTT |
| | | (SEQ ID NO: 205) |
| hCV2152706 | C/T | ACTGCCTGACCCAGTCTGATTTATAG |
| | | (SEQ ID NO: 208) |
| hCV25618493 | G/A | GTAGCTGTGCAGTGACAGTGT |
| | | (SEQ ID NO: 211) |
| hCV25753038 | T/C | TCCCTCTTTGCTCATTCATC |
| | | (SEQ ID NO: 214) |
| hCV3225041 | A/G | CAGGGAAGGACGGCCTAATATCA |
| | | (SEQ ID NO: 217) |
| hCV7818113 | G/T | GCTCCTGCCCTCTCTGATAAT |
| | | (SEQ ID NO: 220) |
| hCV7818335 | A/T | GGAAGTGCCCCAAAGAGA |
| | | (SEQ ID NO: 223) |
| hCV7818385 | C/T | CAGTCCCCAAATCACTGAA |
| | | (SEQ ID NO: 226) |
| hCV7818394 | C/T | GACACACAGCCCCGAAGTA |
| | | (SEQ ID NO: 229) |
| hCV8780857 | A/G | GGTGGATTCACAGAGAAGATC |
| | | (SEQ ID NO: 232) |

TABLE 5

| | SNP Marker Identifier | | | | Risk Allele | | | |
|---|---|---|---|---|---|---|---|---|
| Gene | Celera | NCBI | Risk | | Frequency (%) | | | P |
| Symbol | hCV# | RefSeq | Allele | Study | Case | Control | OR | value |
| AQP10 | hCV25753038 | rs6685323 | T | 1 | 35 | 28 | 1.37 | 0.042 |
| | | | | 2 | 33 | 27 | 1.32 | 0.008 |
| AQP10 | hCV25618493 | rs6668968 | A | 1 | 34 | 28 | 1.36 | 0.049 |
| | | | | 2 | 33 | 27 | 1.34 | 0.004 |
| EGFL7 | hCV8780857 | rs1051828 | G | 1 | 92 | 87 | 1.73 | 0.019 |
| | | | | 2 | 92 | 88 | 1.48 | 0.016 |
| HNRPUL1 | hCV7818335 | rs11881940 | A | 1 | 87 | 79 | 1.74 | 0.004 |
| | | | | 2 | 86 | 82 | 1.34 | 0.024 |
| KIAA0664 | hCV11677037 | rs11078312 | T | 1 | 11 | 7 | 1.81 | 0.024 |
| | | | | 2 | 12 | 9 | 1.40 | 0.028 |
| VAMP8 | hCV2091644 | rs1010 | G | 1 | 47 | 37 | 1.48 | 0.007 |
| | | | | 2 | 45 | 40 | 1.26 | 0.017 |

TABLE 6

| | SNP Marker Identifier | | | | | | | | |
|---|---|---|---|---|---|---|---|---|---|
| Gene | Celera | NCBI | Risk | | Freq (%) | | | OR | P |
| Symbol | hCV# | RefSeq | Allele | Genotype | Case | Cont | OR | 90% CI | value |
| AQP10 | hCV25753038 | rs6685323 | T | CC | 43.9 | 51.2 | | | |
| | | | | TC | 43.9 | 43.8 | 1.17 | 0.86-1.58 | 0.2000 |
| | | | | TT | 12.3 | 5.1 | 2.83 | 1.66-4.83 | 0.0007 |
| AQP10 | hCV25618493 | rs6668968 | A | GG | 44.1 | 51.2 | | | |
| | | | | AG | 43.5 | 43.8 | 1.16 | 0.85-1.51 | 0.2200 |
| | | | | AA | 12.4 | 5.1 | 2.82 | 1.65-4.81 | 0.0007 |
| HNRPUL1 | hCV7818335 | rs11881940 | A | TT | 2.1 | 2.1 | | | |
| | | | | TA | 21.4 | 30.7 | NA | NA | NA |
| | | | | AA | 76.5 | 67.2 | 1.63 | 1.16-2.30 | 0.0090 |
| KIAA0664 | hCV11677037 | rs11078312 | T | CC | 76.2 | 81.3 | | | |
| | | | | TC | 22.7 | 18 | 1.35 | 0.94-1.92 | 0.0830 |
| | | | | TT | 1.1 | 0.7 | 1.67 | 0.37-7.52 | 0.2900 |
| VAMP8 | hCV2091644 | rs1010 | G | AA | 26.2 | 31.9 | | | |
| | | | | GA | 54.0 | 48.5 | 1.35 | 0.97-1.90 | 0.0700 |
| | | | | GG | 19.8 | 19.6 | 1.23 | 0.80-1.87 | 0.2200 |
| EGFL7 | hCV8780857 | rs1051828 | G | AA | 0.0 | 1.6 | | | |
| | | | | AG | 19.8 | 22.1 | NA | NA | NA |
| | | | | GG | 80.2 | 76.3 | 1.18 | 0.82-1.68 | 0.2300 |

NA = Not Applicable, due to small number of non-risk homozygotes.

TABLE 7

| | SNP Marker Identifier | | | | | |
|---|---|---|---|---|---|---|
| | Celera | NCBI | | | OR | |
| Gene Symbol | hCV# | RefSeq | Model | OR | 90% CI | P value |
| HNRPUL1 | hCV7818335 | rs11881940 | Recessive | 1.59 | 1.14-2.21 | 0.011 |
| VAMP8 | hCV2091644 | rs1010 | Dominant | 1.32 | 0.96-1.82 | 0.079 |
| EGFL7 | hCV8780857 | rs1051828 | Allelic | 1.33 | 0.95-1.86 | 0.080 |
| AQP10 | hCV25618493 | rs6668968 | Recessive | 2.63 | 1.57-4.39 | 0.001 |
| AQP10 | hCV25753038 | rs6685323 | Recessive | 2.63 | 1.57-4.39 | 0.001 |
| KIAA0664 | hCV11677037 | rs11078312 | Dominant | 1.36 | 0.96-1.93 | 0.074 |

TABLE 8

| | | SNP Marker Identifier | | | | | | |
|---|---|---|---|---|---|---|---|---|
| | Gene | Celera | NCBI | Risk | Freq (%) | | | P |
| Region | Symbol | hCV# | RefSeq | Allele | Case | Cont | OR | value |
| VAMP8 | Intergenic | hCV2152706 | rs2044475 | T | 25 | 21 | 1.26 | 0.037 |
| | GGCX | hCV3225041 | rs2028898 | A | 32 | 27 | 1.22 | 0.051 |
| | GGCX | hCV1036123 | rs699664 | T | 36 | 32 | 1.19 | 0.090 |
| | VAMP8 | hCV2091643 | rs1058588 | T | 46 | 40 | 1.24 | 0.021 |
| | VAMP5 | hCV2091655 | rs719023 | T | 45 | 41 | 1.16 | 0.100 |
| | VAMP8 | hCV2091644 | rs1010 | C | 45 | 40 | 1.25 | 0.019 |
| HNRPUL1 | AXL | hCV11707934 | rs4802113 | T | 57 | 53 | 1.19 | 0.063 |
| | AXL | hCV7818113 | rs12978323 | T | 73 | 69 | 1.22 | 0.059 |
| | MGC20255 | hCV7818385 | rs6957 | T | 85 | 82 | 1.25 | 0.084 |
| | Intergenic | hCV7818394 | rs12981053 | C | 88 | 84 | 1.35 | 0.027 |
| | HNRPUL1 | hCV7818335 | rs11881940 | A | 86 | 82 | 1.33 | 0.027 |

TABLE 9

| Interrogated | Interrogated | | | | Threshold | |
|---|---|---|---|---|---|---|
| SNP | rs | LD SNP | LD SNP rs | Power | r_{T}² | r² |
| hCV2091643 | rs1058588 | hCV1036124 | rs762684 | 0.51 | 0.57 | 0.59 |
| hCV2091643 | rs1058588 | hCV11504816 | rs10187424 | 0.51 | 0.57 | 0.97 |
| hCV2091643 | rs1058588 | hCV11942430 | rs2043675 | 0.51 | 0.57 | 0.59 |
| hCV2091643 | rs1058588 | hCV2091600 | rs6757263 | 0.51 | 0.57 | 1 |
| hCV2091643 | rs1058588 | hCV2091603 | rs6739015 | 0.51 | 0.57 | 0.97 |
| hCV2091643 | rs1058588 | hCV2091604 | rs6547620 | 0.51 | 0.57 | 0.96 |
| hCV2091643 | rs1058588 | hCV2091608 | rs6705971 | 0.51 | 0.57 | 0.90 |
| hCV2091643 | rs1058588 | hCV2091611 | rs1446669 | 0.51 | 0.57 | 0.65 |
| hCV2091643 | rs1058588 | hCV2091614 | rs10179195 | 0.51 | 0.57 | 0.93 |
| hCV2091643 | rs1058588 | hCV2091619 | rs2028900 | 0.51 | 0.57 | 0.85 |
| hCV2091643 | rs1058588 | hCV2091627 | rs6547621 | 0.51 | 0.57 | 0.85 |
| hCV2091643 | rs1058588 | hCV2091639 | rs3770098 | 0.51 | 0.57 | 1 |
| hCV2091643 | rs1058588 | hCV2091640 | rs7579147 | 0.51 | 0.57 | 0.61 |
| hCV2091643 | rs1058588 | hCV2091642 | rs1009 | 0.51 | 0.57 | 1 |
| hCV2091643 | rs1058588 | hCV2091644 | rs1010 | 0.51 | 0.57 | 1 |
| hCV2091643 | rs1058588 | hCV2091645 | rs1562323 | 0.51 | 0.57 | 1 |
| hCV2091643 | rs1058588 | hCV2091646 | rs2366639 | 0.51 | 0.57 | 1 |
| hCV2091643 | rs1058588 | hCV2091650 | rs10206961 | 0.51 | 0.57 | 0.64 |
| hCV2091643 | rs1058588 | hCV2152705 | rs7591175 | 0.51 | 0.57 | 0.79 |
| hCV2091643 | rs1058588 | hCV2152722 | rs2166529 | 0.51 | 0.57 | 0.79 |
| hCV2091643 | rs1058588 | hCV25474505 | rs7568458 | 0.51 | 0.57 | 0.90 |
| hCV2091643 | rs1058588 | hCV25935078 | rs3731828 | 0.51 | 0.57 | 0.62 |
| hCV2091643 | rs1058588 | hCV26041127 | rs1348818 | 0.51 | 0.57 | 0.88 |
| hCV2091643 | rs1058588 | hCV27477415 | rs3755015 | 0.51 | 0.57 | 0.84 |
| hCV2091643 | rs1058588 | hCV27509123 | rs3731827 | 0.51 | 0.57 | 1 |
| hCV2091643 | rs1058588 | hCV27844828 | rs6743030 | 0.51 | 0.57 | 0.85 |
| hCV2091643 | rs1058588 | hCV29307503 | rs6738645 | 0.51 | 0.57 | 0.85 |
| hCV2091643 | rs1058588 | hCV29672495 | rs2044474 | 0.51 | 0.57 | 0.97 |
| hCV2091643 | rs1058588 | hCV3225041 | rs2028898 | 0.51 | 0.57 | 0.59 |
| hCV2091643 | rs1058588 | hCV3225044 | rs2592551 | 0.51 | 0.57 | 0.59 |
| hCV2091643 | rs1058588 | hDV70813561 | rs17026396 | 0.51 | 0.57 | 0.97 |
| hCV2091643 | rs1058588 | hDV71114835 | rs1078004 | 0.51 | 0.57 | 0.85 |
| hCV2091643 | rs1058588 | hDV71125017 | rs1561198 | 0.51 | 0.57 | 0.88 |
| hCV2091643 | rs1058588 | hDV71174532 | rs2886722 | 0.51 | 0.57 | 0.90 |
| hCV2091644 | rs1010 | hCV11504816 | rs10187424 | 0.51 | 0.82 | 0.97 |
| hCV2091644 | rs1010 | hCV2091600 | rs6757263 | 0.51 | 0.82 | 1 |
| hCV2091644 | rs1010 | hCV2091603 | rs6739015 | 0.51 | 0.82 | 0.97 |
| hCV2091644 | rs1010 | hCV2091604 | rs6547620 | 0.51 | 0.82 | 0.96 |
| hCV2091644 | rs1010 | hCV2091608 | rs6705971 | 0.51 | 0.82 | 0.90 |
| hCV2091644 | rs1010 | hCV2091614 | rs10179195 | 0.51 | 0.82 | 0.93 |
| hCV2091644 | rs1010 | hCV2091619 | rs2028900 | 0.51 | 0.82 | 0.85 |
| hCV2091644 | rs1010 | hCV2091627 | rs6547621 | 0.51 | 0.82 | 0.85 |
| hCV2091644 | rs1010 | hCV2091639 | rs3770098 | 0.51 | 0.82 | 1 |
| hCV2091644 | rs1010 | hCV2091642 | rs1009 | 0.51 | 0.82 | 1 |
| hCV2091644 | rs1010 | hCV2091643 | rs1058588 | 0.51 | 0.82 | 1 |
| hCV2091644 | rs1010 | hCV2091645 | rs1562323 | 0.51 | 0.82 | 1 |
| hCV2091644 | rs1010 | hCV2091646 | rs2366639 | 0.51 | 0.82 | 1 |
| hCV2091644 | rs1010 | hCV2152744 | rs10198569 | 0.51 | 0.82 | 0.97 |
| hCV2091644 | rs1010 | hCV25474505 | rs7568458 | 0.51 | 0.82 | 0.90 |
| hCV2091644 | rs1010 | hCV26041127 | rs1348818 | 0.51 | 0.82 | 0.88 |
| hCV2091644 | rs1010 | hCV26995932 | rs10172544 | 0.51 | 0.82 | 0.97 |
| hCV2091644 | rs1010 | hCV27477415 | rs3755015 | 0.51 | 0.82 | 0.84 |
| hCV2091644 | rs1010 | hCV27509123 | rs3731827 | 0.51 | 0.82 | 1 |
| hCV2091644 | rs1010 | hCV27844828 | rs6743030 | 0.51 | 0.82 | 0.85 |
| hCV2091644 | rs1010 | hCV29307503 | rs6738645 | 0.51 | 0.82 | 0.85 |
| hCV2091644 | rs1010 | hCV29672495 | rs2044474 | 0.51 | 0.82 | 0.97 |
| hCV2091644 | rs1010 | hDV70813561 | rs17026396 | 0.51 | 0.82 | 0.97 |
| hCV2091644 | rs1010 | hDV71114835 | rs1078004 | 0.51 | 0.82 | 0.85 |
| hCV2091644 | rs1010 | hDV71125017 | rs1561198 | 0.51 | 0.82 | 0.88 |
| hCV2091644 | rs1010 | hDV71174532 | rs2886722 | 0.51 | 0.82 | 0.90 |
| hCV2152706 | rs2044475 | hCV11942424 | rs2044476 | 0.51 | 0.93 | 1 |
| hCV25618493 | rs6668968 | hCV25618512 | rs6702754 | 0.51 | 0.49 | 0.96 |
| hCV25618493 | rs6668968 | hCV25618512 | rs6702754 | 0.51 | 0.49 | 1 |
| hCV25618493 | rs6668968 | hCV25753038 | rs6685323 | 0.51 | 0.49 | 0.96 |
| hCV25618493 | rs6668968 | hCV25753038 | rs6685323 | 0.51 | 0.49 | 1 |
| hCV25618493 | rs6668968 | hCV3158447 | rs6688376 | 0.51 | 0.49 | 0.67 |
| hCV25618493 | rs6668968 | hCV3158447 | rs6688376 | 0.51 | 0.49 | 0.75 |
| hCV25618493 | rs6668968 | hCV3158496 | rs6672010 | 0.51 | 0.49 | 0.96 |
| hCV25618493 | rs6668968 | hCV3158496 | rs6672010 | 0.51 | 0.49 | 1 |
| hCV25753038 | rs6685323 | hCV25618512 | rs6702754 | 0.51 | 0.49 | 1 |
| hCV25753038 | rs6685323 | hCV3158447 | rs6688376 | 0.51 | 0.49 | 0.71 |
| hCV25753038 | rs6685323 | hCV3158496 | rs6672010 | 0.51 | 0.49 | 1 |
| hCV3225041 | rs2028898 | hCV1036123 | rs699664 | 0.51 | 0.70 | 0.84 |
| hCV3225041 | rs2028898 | hCV1036124 | rs762684 | 0.51 | 0.70 | 1 |
| hCV3225041 | rs2028898 | hCV11942430 | rs2043675 | 0.51 | 0.70 | 1 |
| hCV3225041 | rs2028898 | hCV2091611 | rs1446669 | 0.51 | 0.70 | 1 |
| hCV3225041 | rs2028898 | hCV2091640 | rs7579147 | 0.51 | 0.70 | 0.96 |
| hCV3225041 | rs2028898 | hCV25935078 | rs3731828 | 0.51 | 0.70 | 0.97 |
| hCV3225041 | rs2028898 | hCV3225044 | rs2592551 | 0.51 | 0.70 | 1 |
| hCV7818335 | rs11881940 | hCV11464036 | rs1056854 | 0.51 | 0.70 | 1 |
| hCV7818335 | rs11881940 | hCV11707875 | rs12980480 | 0.51 | 0.70 | 1 |
| hCV7818335 | rs11881940 | hCV15974002 | rs2304232 | 0.51 | 0.70 | 0.72 |
| hCV7818335 | rs11881940 | hCV25473132 | rs4591267 | 0.51 | 0.70 | 0.72 |
| hCV7818335 | rs11881940 | hCV25806230 | rs3752705 | 0.51 | 0.70 | 1 |
| hCV7818335 | rs11881940 | hCV29247288 | rs7248164 | 0.51 | 0.70 | 1 |
| hCV7818335 | rs11881940 | hCV29247289 | rs7245398 | 0.51 | 0.70 | 0.92 |
| hCV7818335 | rs11881940 | hCV30481583 | rs10421990 | 0.51 | 0.70 | 1 |
| hCV7818335 | rs11881940 | hCV31639660 | rs12974420 | 0.51 | 0.70 | 1 |
| hCV7818335 | rs11881940 | hCV31639667 | rs12984160 | 0.51 | 0.70 | 0.92 |
| hCV7818335 | rs11881940 | hCV7818153 | rs1946613 | 0.51 | 0.70 | 0.72 |
| hCV7818335 | rs11881940 | hCV7818174 | rs3760660 | 0.51 | 0.70 | 0.72 |
| hCV7818335 | rs11881940 | hCV7818183 | rs3816052 | 0.51 | 0.70 | 1 |
| hCV7818335 | rs11881940 | hCV7818184 | rs2304230 | 0.51 | 0.70 | 1 |
| hCV7818335 | rs11881940 | hCV7818199 | rs8103839 | 0.51 | 0.70 | 1 |
| hCV7818335 | rs11881940 | hCV7818207 | rs3745295 | 0.51 | 0.70 | 1 |
| hCV7818335 | rs11881940 | hCV7818223 | rs8105901 | 0.51 | 0.70 | 1 |
| hCV7818335 | rs11881940 | hCV7818230 | rs12327659 | 0.51 | 0.70 | 1 |
| hCV7818335 | rs11881940 | hCV7818231 | rs2053086 | 0.51 | 0.70 | 1 |
| hCV7818335 | rs11881940 | hCV7818236 | rs12985339 | 0.51 | 0.70 | 1 |
| hCV7818335 | rs11881940 | hCV7818243 | rs7258749 | 0.51 | 0.70 | 1 |
| hCV7818335 | rs11881940 | hCV7818343 | rs4456618 | 0.51 | 0.70 | 0.92 |
| hCV7818335 | rs11881940 | hCV7818351 | rs8109167 | 0.51 | 0.70 | 0.75 |
| hCV7818335 | rs11881940 | hCV7818359 | rs1865051 | 0.51 | 0.70 | 0.92 |
| hCV7818335 | rs11881940 | hCV7818364 | rs3826714 | 0.51 | 0.70 | 0.92 |
| hCV7818335 | rs11881940 | hCV7818385 | rs6957 | 0.51 | 0.70 | 0.92 |
| hCV7818335 | rs11881940 | hCV7818393 | rs12980942 | 0.51 | 0.70 | 0.87 |
| hCV7818335 | rs11881940 | hCV7818395 | rs7254679 | 0.51 | 0.70 | 0.77 |
| hCV7818335 | rs11881940 | hDV69498970 | rs12327574 | 0.51 | 0.70 | 1 |
| hCV7818394 | rs12981053 | hCV7818393 | rs12980942 | 0.51 | 0.63 | 0.79 |

The application's sequence listing, which the Patent Office published only in electronic form, follows.

SEQUENCE LISTING (232 sequences)

SEQ ID NO: 1 - DNA, 3660 bp, Homo Sapiens
aaagagtcaaggcttagtaatattcctgaattcctgaaggagttaagaaaggaaaaggacaagcgggggtctaaacgagagcacgaaccctcagcgtatgacggctccaggctccgggggaaagtcctttagccatccatcccaaaattaagcacgctgggagctggagtcacagcagtgataaaacgaacaatgattctggttcctactgactgacaggagaggtttaagggtctctcactctccggggagcccctttccttcctggctgcggagggcggagcccgagagaggcacgcatgcgcaatgcaacgtctgccttaggcccggaacttcggtgcctgggcgcagcggtgcacccggacccggaacattctcaggcgaaagtgtctcttgcgtgcgtgggccggaggttagtgtgcggggcccgccgggcggttgaaaagtccgagagaatcaggatggaggccgtggcgacggcgacggcggcgaaggaacccgataagggctgcatagagcctggacctgggcactggggtgagctgagccggacaccagtcccatctaaaccccaggacaaagtggaagcagctgaggcaacaccagtggccctggacagtgacacctccggggctgaaaatgcagcagtgagtgctatgctgcacgctgtagccgccagccgcctgcctgtttgcagccagcagcagggtgaacccgacttgacagagcatgagaaagtggccatcctggcccagctgtaccacgagaagccactggtgttcctggagcgcttccgcacaggcctccgtgaggagcatctggcctgctttggccacgtgcgtggcgaccaccgtgcagacttctactgtgctgaggtggcccggcagggcactgcccggccccgcaccctgcgtacccgcctgcgtaaccggcgctatgctgccctgcgagagctgatccaagggggcgagtacttcagtgatgagcagatgcggttccgggcccccctgctatatgagcagtacatcgggcagtatctcacccaggaggagctcagtgcccgcaccccaacccaccagccccccaagcccgggtcccccgggagacctgcttgcccgctctccaacttgctgctccagtcctacgaggagcgggagctacagcagcgtctgctccaacagcaggaggaggaggaggcctgcttggaggaagaggaagaggaggaggacagtgacgaggaagaccagaggtcaggcaaggactcggaggcctgggttcccgactcggaggagaggctgatcctgcgagaggagttcaccagccgcatgcaccagcgcttcctagatggcaaggacggggactttgactacagcacagtagacgacaaccccgacttcgacaacctcgacatcgtggcacgggatgaggaggagaggtactttgatgaggaagaacctgaggatgcgcccagcccagagctggatggggactgatggccgccacccttcccaccgcctgccccatccccatccccaacaaggcagctgattccaggcctgctcagtgaccctttctctagggggacatcagggcagtgccccacaacccacacacaccaccatctcactgggtctagtctcatctcagacaacccccacccccactgtttctggggttccctttctcatctctcccaccctgtctcctgcctctgtctttcttggtgtctgtctgggcttctttctgtctctttctgtctttctgtctctctccctacccccgctccctctttccagtgctctggctggctgtctctccctttctccccctctctctctgccttaggctctgtctccaccgcagggcccaaggtgaaagtcctccccttgccggaggccagctggcagggcctttcgtggctggaagtggccagtttggttccggtgctgacccctaggccccagcgcagctgcctcccgtgctgtctgtctccccctctctgtttatgtctgcgctgtgtctcacactcagagcctccttgcttctgttaggttcccatctctccttctgcctcactctgggcctcttctttctacttgtacatttccacctctctaggcctctgctctcactgtccctctctgtctgtctctcagcctttatctctgggttttgatccccgactccaggctctgggccccttcttcccccttccctcaaacctggctgctataggcagcagaaccctgaccactgagtaatacagccccaggggagggaggagaccccaggcagggaggatgggggcagctctcttctctccccaggacccaggctgtggatcacggggcctgccagcttgagtgtagagggaggggggactctacccttctcagccccaccagcccccctctgcccaaccacaattttcccttcctccgccttcctctcccactcctgtttacactccccaaatgcgcacaggctgttatcatgggtcctgagtcatcccacacacagcctgccccagcgtccctgcccccagctggccgcagggcccgccccatggagccccctgccgccctgggctaatgggagccagatggccgcctggtgactcagccaccgggcctgtgggaacccaggcgtcccgccttcccatgcccccacacccggctcctgctcccccagcagacacacacaggagggcctggccactgttgagggggcacacagggcaagggtcaccaagtcggggcctagggactcctcatgcctctgagatggaatggtggtatcctgccgtggccaagcctgaaggaccctcaaaactgcctcctggagtccacggttcctgacctccgagcctcagctatgccctctgggtcaaccagaattagagccagacagggaaagtgagagctggatggaggcagacaagatgctcagagcgactattaaagaacgaaagcctctgctacggagcgcttctgtcctctgtcaggcccgagcgaagtgcctgacaccgggttggatcctcagatggccccatgaactagtgaagtgggtcaaaggaggcctggaaagatgttgcttcctcaaggccactcggccatcagaggcagaaatgaaacaggaacccaggcctagaatcacaaaggtcctagaaaccacttggctgtctggcctctcaggtgtcagggccatccagagtgagacagcattggagggacaagtgtgcatgcagatgtcctcagacgggaaggtttgagaagggtcagatggtaggcgggcctaacaagggctccgtgctagccactgtcccgcacacagacaggatcaggtcatcttgatatggagatcagtccccaaatcactgaattgtcccagcagtgctatgccctaggtactaccaatatcactcctctatttcccagaggaggaagcagcagctagactccaggaccttggggtcatatctctcagaaagccaagagtgcaggatgagagctgtctgtctcttacctgcctgtatttgtgccccatttttaaagagcagagggcctgggccacaggaaaggtatcagcccttggtgataggcacattttttaccagtctatcatttggtcattaaatttgtttacaatatactttgctat

SEQ ID NO: 2 - DNA, 1413 bp, Homo Sapiens
gccagcggaggagagagtgggcgccaccgtggggctgtcccaccggtggaggctccagcggagatgagctgggcaggcctcgcggagcaagtgcaaactgcacccgcgtcctgggggcatctgcggggagacttaggggtcatgctttgtgccccaggccacccagaggagaaggccaccccgcctggaggcacaggccatgaggggctctcaggaggtgctgctgatgtggcttctggtgttggcagtgggcggcacagagcacgcctaccggcccggccgtagggtgtgtgctgtccgggctcacggggaccctgtctccgagtcgttcgtgcagcgtgtgtaccagcccttcctcaccacctgcgacgggcaccgggcctgcagcacctaccgaaccatctataggaccgcctaccgccgcagccctgggctggcccctgccaggcctcgctacgcgtgctgccccggctggaagaggaccagcgggcttcctggggcctgtggagcagcaatatgccagccgccatgccggaacggagggagctgtgtccagcctggccgctgccgctgccctgcaggatggcggggtgacacttgccagtcagatgtggatgaatgcagtgctaggaggggcggctgtccccagcgctgcgtcaacaccgccggcagttactggtgccagtgttgggaggggcacagcctgtctgcagacggtacactctgtgtgcccaagggagggccccccagggtggcccccaacccgacaggagtggacagtgcaatgaaggaagaagtgcagaggctgcagtccagggtggacctgctggaggagaagctgcagctggtgctggccccactgcacagcctggcctcgcaggcactggagcatgggctcccggaccccggcagcctcctggtgcactccttccagcagctcggccgcatcgactccctgagcgagcagatttccttcctggaggagcagctggggtcctgctcctgcaagaaagactcgtgactgcccagcgccccaggctggactgagcccctcacgccgccctgcagcccccatgcccctgcccaacatgctgggggtccagaagccacctcggggtgactgagcggaaggccaggcagggccttcctcctcttcctcctccccttcctcgggaggctccccagaccctggcatgggatgggctgggatcttctctgtgaatccacccctggctacccccaccctggctaccccaacggcatcccaaggccaggtgggccctcagctgagggaaggtacgagctccctgctggagcctgggacccatggcacaggccaggcagcccggaggctgggtggggcctcagtgggggctgctgcctgacccccagcacaataaaaatgaaacgtga

SEQ ID NO: 3 - DNA, 1742 bp, Homo Sapiens
ccaagctggccctgcacggctgcaagggaggctcctgtggacaggccaggcaggtgggcctcaggaggtgcctccaggcggccagtgggcctgaggccccagcaagggctagggtccatctccagtcccaggacacagcagcggccaccatggccacgcctgggctccagcagcatcagagcagcccctgtggttggcagcaaagttcagcttggctgggcccgctgtgaggggcttcgcgctacgccctgcggtgtcccgagggctgaggtctcctcatcttctccctagcagtggatgagcaacccaacgggggcccggggaggggaactggccccgagggagaggaaccccaaagccacatctgtagccaggatgagcagtgtgaatccaggcccccaggaccggggaggcacaggtggcccccaccacccggaggagcagctcctgcccctgtccgggggatgactgattctcctccgccaggccacccagaggagaaggccaccccgcctggaggcacaggccatgaggggctctcaggaggtgctgctgatgtggcttctggtgttggcagtgggcggcacagagcacgcctaccggcccggccgtagggtgtgtgctgtccgggctcacggggaccctgtctccgagtcgttcgtgcagcgtgtgtaccagcccttcctcaccacctgcgacgggcaccgggcctgcagcacctaccgaaccatctataggaccgcctaccgccgcagccctgggctggcccctgccaggcctcgctacgcgtgctgccccggctggaagaggaccagcgggcttcctggggcctgtggagcagcaatatgccagccgccatgccggaacggagggagctgtgtccagcctggccgctgccgctgccctgcaggatggcggggtgacacttgccagtcagatgtggatgaatgcagtgctaggaggggcggctgtccccagcgctgcgtcaacaccgccggcagttactggtgccagtgttgggaggggcacagcctgtctgcagacggtacactctgtgtgcccaagggagggccccccagggtggcccccaacccgacaggagtggacagtgcaatgaaggaagaagtgcagaggctgcagtccagggtggacctgctggaggagaagctgcagctggtgctggccccactgcacagcctggcctcgcaggcactggagcatgggctcccggaccccggcagcctcctggtgcactccttccagcagctcggccgcatcgactccctgagcgagcagatttccttcctggaggagcagctggggtcctgctcctgcaagaaagactcgtgactgcccagcgccccaggctggactgagcccctcacgccgccctgcagcccccatgcccctgcccaacatgctgggggtccagaagccacctcggggtgactgagcggaaggccaggcagggccttcctcctcttcctcctccccttcctcgggaggctccccagaccctggcatgggatgggctgggatcttctctgtgaatccacccctggctacccccaccctggctaccccaacggcatcccaaggccaggtgggccctcagctgagggaaggtacgagctccctgctggagcctgggacccatggcacaggccaggcagcccggaggctgggtggggcctcagtgggggctgctgcctgacccccagcacaataaaaatgaaacgtga

SEQ ID NO: 4 - DNA, 1537 bp, Homo Sapiens
tccctgcaccaagctggccctgcacggctgcaagggaggctcctgtggacaggccaggcaggtgggcctcaggaggtgcctccaggcggccagtgggcctgaggccccagcaagggctagggtccatctccagtcccaggacacagcagcggccaccatggccacgcctgggctccagcagcatcagcagcccccaggaccggggaggcacaggtggcccccaccacccggaggagcagctcctgcccctgtccgggggatgactgattctcctccgccaggccacccagaggagaaggccaccccgcctggaggcacaggccatgaggggctctcaggaggtgctgctgatgtggcttctggtgttggcagtgggcggcacagagcacgcctaccggcccggccgtagggtgtgtgctgtccgggctcacggggaccctgtctccgagtcgttcgtgcagcgtgtgtaccagcccttcctcaccacctgcgacgggcaccgggcctgcagcacctaccgaaccatctataggaccgcctaccgccgcagccctgggctggcccctgccaggcctcgctacgcgtgctgccccggctggaagaggaccagcgggcttcctggggcctgtggagcagcaatatgccagccgccatgccggaacggagggagctgtgtccagcctggccgctgccgctgccctgcaggatggcggggtgacacttgccagtcagatgtggatgaatgcagtgctaggaggggcggctgtccccagcgctgcgtcaacaccgccggcagttactggtgccagtgttgggaggggcacagcctgtctgcagacggtacactctgtgtgcccaagggagggccccccagggtggcccccaacccgacaggagtggacagtgcaatgaaggaagaagtgcagaggctgcagtccagggtggacctgctggaggagaagctgcagctggtgctggccccactgcacagcctggcctcgcaggcactggagcatgggctcccggaccccggcagcctcctggtgcactccttccagcagctcggccgcatcgactccctgagcgagcagatttccttcctggaggagcagctggggtcctgctcctgcaagaaagactcgtgactgcccagcgccccaggctggactgagcccctcacgccgccctgcagcccccatgcccctgcccaacatgctgggggtccagaagccacctcggggtgactgagcggaaggccaggcagggccttcctcctcttcctcctccccttcctcgggaggctccccagaccctggcatgggatgggctgggatcttctctgtgaatccacccctggctacccccaccctggctaccccaacggcatcccaaggccaggtgggccctcagctgagggaaggtacgagctccctgctggagcctgggacccatggcacaggccaggcagcccggaggctgggtggggcctcagtgggggctgctgcctgacccccagcacaataaaaatgaaacgtga

SEQ ID NO: 5 - DNA, 4615 bp, Homo Sapiens
gcggccgccccggccgacagcgcccgggaacacggctcgcaggccgggggcaaggggcggccgggcgcggccgagctgccatcagtcatgctcttaaacggggactgcccagagagcctgaagaaggaggcggcggcggccgagccacccagggaaaatgggcttgacgaggccggcccgggagatgagaccaccggccaggaagtcattgtcattcaggacacgggcttttctgtgaagatcctcgcccctgggatcgagcccttctccctgcaggtgtccccccaggagatggtgcaggagattcaccaggtgctcatggaccgggaggacacgtgtcaccgcacctgcttctcactgcacctggatggcaacgtgctggaccacttctcggagctgcgcagcgtcgaggggctgcaggagggctctgtgctgcgtgtggtggaagagccgtacacggtgcgtgaggcccgcatccacgtgcgccatgtccgagacctgctcaagagcctggacccatccgatgccttcaacggggttgactgcaactccttgtccttcctgagtgtcttcaccgacggcgacctgggagacagcgggaagcggaagaagggcttggagatggaccccatcgactgcacaccacccgagtacatcctgccagggagccgggagcggccactgtgtcccctgcagccccaaaaccgtgactggaagcccttgcagtgcctgaaagtactcaccatgagcggatggaacccgcccccggggaaccggaagatgcacggggacctcatgtacctgtttgtgatcacagccgaggaccggcaagtcagcatcaccgcgtccacacggggcttttacctgaatcagtccacagcttatcacttcaaccccaagcccgccagcccccgcttcctaagccattccctagtggagctgctcaaccagatcagcccgaccttcaagaagaacttcgctgtgctgcagaagaaaagggtccagcgccacccgttcgagaggatcgccaccccattccaggtgtacagctggacagccccccaggcggagcatgccatggattgcgtgcgtgcagaggacgcctacacctcgaggctgggctatgaggagcacattcctggacagacccgagactggaatgaggagctgcagacgacgagggagctgcctcgcaagaacctgcctgagcggctgctccgagaaagggccatattcaaggtgcacagcgacttcaccgcggcagccaccaggggcgccatggccgtcattgacggcaacgtgatggccatcaaccccagcgaggagaccaagatgcagatgttcatctggaacaacatcttcttcagcctgggcttcgacgtccgagaccactacaaggacttcgggggggacgtggcggcctacgtggcgcccaccaacgacctgaatggcgtccgcacgtacaacgcggtggacgtggaggggctgtacacgctgggcacggtggtggtggattaccgcggctaccgggtcacggcccagtccatcatccccggcatcctggagcgggaccaggagcagagcgtcatctacggctccatcgacttcggcaagaccgtggtgtcacacccgcggtacctggagctgctggagcgcacgagtcggcccctcaagatcctgcggcaccaggtgctcaacgaccgtgacgaggaggtggagctctgctcctcggtcgagtgcaagggcatcattggcaacgacgggcgccactacatcctcgacctgctgcgcaccttccccccggacctcaacttcctgcccgtgcctggcgaggagctgcctgaggaatgcgcccgcgccggcttcccccgcgcccaccggcacaagctctgctgcctgcgccaggagctggtggacgccttcgtggagcacaggtacctcctctttatgaagctggccgccttgcagctgatgcagcagaacgccagccagctggagaccccctcctccctggaaaatggtggtccttcctccttggagtccaagtctgaggatcctccaggacaggaggcgggaagtgaggaggagggtagcagcgccagcggcctggccaaggtgaaggagctggcagagaccatcgccgcagacgacggcacagcagaccctcggagccgggaggtgatccgcaacgcgtgcaaggcggtcggctccatcagcagcaccgccttcgacattcgcttcaatcctgacatcttctcaccaggggttcgtttccctgagtcctgccaggatgaagttcgggaccagaagcagctgctgaaggacgcggctgccttcctgctctcctgccagatccctggcttggtgaaggactgcatggagcacgcggtcctgcccgtggacggggcaacgctggcagaggtgatgcgccagcggggcatcaacatgcgctacctgggcaaggtgctggagctggtgctgcggagcccggcccgccaccagctggaccacgtctttaaaatcggcattggagaactcatcacccgctcggccaagcacatcttcaagacgtacttacagggagtcgagctctccggcctctcagccgccatcagccacttcctgaactgcttcccgggtgatgggcaccgagcaccccaacaccatccaggaatacatgcacctggccctgtactgcttcgccagcagccagctgtccaccgccctgagcctgctgtaccgcgcccgctacctcatgctgctggtgttcggggaagaccaccccgagatggcgctgctggacaacaacatcgggctggtgctgcacggggtgatggagtacgacctgtcgctgcgcttcctggagaacgcgctggccgtcagcaccaagtaccacgggcccaaggccctcaaggtggccctcagccaccaccttgtcgcccgagtctacgagagcaaagctgagttccggtcggccctgcagcacgagaaggagggttacaccatctacaagacgcagctgggcgaggaccatgagaagaccaaggaaagctccgagtacctcaagtgcctgacccagcaggccgtggccctgcagcgcaccatgaacgagatctaccgcaacggctccagcgccaacatcccgcccctcaagttcacggcccccagcatggccagcgtcttggagcagctgaacgtcattaacggcatcctcttcattcctctcagccaaaaagacctggagaatctgaaagccgaggtggcgcggcggcaccagctccaggaggccagcagaaacagggatagagccgaggagcccatggctaccgagcccgcgccagcgggggccccaggagacctgggctcccagcccccggctgccaaggacccttctccgagcgtgcagggatagagagggagccagacggacagccagccagcggccccgtcaccagggagcccgactgcgggagaagggggcgagcctgcgggcggaagaggaagcaaggccctcttcctccacgtctcaccccaccccacccccgtgtcctcctgggagcctggcctgcctgccccgcagaaggtgtttttgcgctggttcaatgaatagatgatgcagaggccccattggagacacgtgaatggcgtgtgcggccatcagttcccggctggggggcaggtgttgcttcggcccccgccctccggccggcgtgtgcgagtgcgcccctggctgtgagtgttgaccgttcctctcccctgtacatagcccgagccagtcctgagtgggtgactcctgagtgggtgacgcgcagacgggatttctcaggtcatttgtatggtcgacatgatggctgctgctttggctgccaccacccccgggcccagcctgtctgaaagttcagggtttaggccgaaaaacccggtggggaggggtggggagccggagctctgtggcggggctggagggctggggtgcactttagtttggggcgggacgggagccgccgttgtgactggcgtggtctggctgctgctcccgaacggaggggtcggggttggcttgctgggccctcagagcccagtgggtggctctgactcggctccctactccctgcacccagctgggcgcagccttggggcctgcggtctgaatgtatccctcccctcagttttaacctgagctgccgaacgcacagtgggccgggggcgaggctgggggaagcggggcccaattacggatcccgggagttacaggtgccgacgtgatgtcgcttctctggtgcccagctcccttcctggtctgagactagctctgggggtggcgggggcccccacacgctgctcccgctccaccctgcccgtgctgctgctctgtgcctgctgtcagagccctggtgggggaggatgtggccaccctgagacccggaggagacgggcgtctgcctgggtttgcggagagccgcttatgggtgtggtccgtccagacaccttgtttcaagggggatgggcgtgagcgggcaagcagagcatccccaccgctgagcaagaactttttcttgtttttaaaccatcacgtcctcatttcacattggaataaagtgagtttttgaaacct

SEQ ID NO: 6 - DNA, 5202 bp, Homo Sapiens
gcggccgccccggccgacagcgcccgggaacacggctcgcaggccgggggcaaggggcggccgggcgcggccgagctgccatcagtcatgctcttaaacggggactgcccagagagcctgaagaaggaggcggcggcggccgagccacccagggaaaatgggcttgacgaggccggcccgggagatgagaccaccggccaggaagtcattgtcattcaggacacgggcttttctgtgaagatcctcgcccctgggatcgagcccttctccctgcaggtgtccccccaggagatggtgcaggagattcaccaggtgctcatggaccgggaggacacgtgtcaccgcacctgcttctcactgcacctggatggcaacgtgctggaccacttctcggagctgcgcagcgtcgaggggctgcaggagggctctgtgctgcgtgtggtggaagagccgtacacggtgcgtgaggcccgcatccacgtgcgccatgtccgagacctgctcaagagcctggacccatccgatgccttcaacggggttgactgcaactccttgtccttcctgagtgtcttcaccgacggcgacctgggagacagcgggaagcggaagaagggcttggagatggaccccatcgactgcacaccacccgagtacatcctgccagggagccgggagcggccactgtgtcccctgcagccccaaaaccgtgactggaagcccttgcagtgcctgaaagtactcaccatgagcggatggaacccgcccccggggaaccggaagatgcacggggacctcatgtacctgtttgtgatcacagccgaggaccggcaagtcagcatcaccgcgtccacacggggcttttacctgaatcagtccacagcttatcacttcaaccccaagcccgccagcccccgcttcctaagccattccctagtggagctgctcaaccagatcagcccgaccttcaagaagaacttcgctgtgctgcagaagaaaagggtccagcgccacccgttcgagaggatcgccaccccattccaggtgtacagctggacagccccccaggcggagcatgccatggattgcgtgcgtgcagaggacgcctacacctcgaggctgggctatgaggagcacattcctggacagacccgagactggaatgaggagctgcagacgacgagggagctgcctcgcaagaacctgcctgagcggctgctccgagaaagggccatattcaaggtgcacagcgacttcaccgcggcagccaccaggggcgccatggccgtcattgacggcaacgtgatggccatcaaccccagcgaggagaccaagatgcagatgttcatctggaacaacatcttcttcagcctgggcttcgacgtccgagaccactacaaggacttcgggggggacgtggcggcctacgtggcgcccaccaacgacctgaatggcgtccgcacgtacaacgcggtggacgtggaggggctgtacacgctgggcacggtggtggtggattaccgcggctaccgggtcacggcccagtccatcatccccggcatcctggagcgggaccaggagcagagcgtcatctacggctccatcgacttcggcaagaccgtggtgtcacacccgcggtacctggagctgctggagcgcacgagtcggcccctcaagatcctgcggcaccaggtgctcaacgaccgtgacgaggaggtggagctctgctcctcggtcgagtgcaagggcatcattggcaacgacgggcgccactacatcctcgacctgctgcgcaccttccccccggacctcaacttcctgcccgtgcctggcgaggagctgcctgaggaatgcgcccgcgccggcttcccccgcgcccaccggcacaagctctgctgcctgcgccaggagctggtggacgccttcgtggagcacaggtacctcctctttatgaagctggccgccttgcagctgatgcagcagaacgccagccagctggagaccccctcctccctggaaaatggtggtccttcctccttggagtccaagtctgaggatcctccaggacaggaggcgggaagtgaggaggagggtagcagcgccagcggcctggccaaggtgaaggagctggcagagaccatcgccgcagacgacggcacagaccctcggagccgggaggtgatccgcaacgcgtgcaaggcggtcggctccatcagcagcaccgccttcgacattcgcttcaatcctgacatcttctcaccaggcagcctctctgctctccctcctccaggggttcgtttccctgagtcctgccaggatgaagttcgggaccagaagcagctgctgaaggacgcggctgccttcctgctctcctgccagatccctggcttggtgaaggactgcatggagcacgcggtcctgcccgtggacggggcaacgctggcagaggtgatgcgccagcggggcatcaacatgcgctacctgggcaaggtgctggagctggtgctgcggagcccggcccgccaccagctggaccacgtctttaaaatcggcattggagaactcatcacccgctcggccaagcacatcttcaagacgtacttacagggagtcgagctctccggcctctcagccgccatcagccacttcctgaactgcttcctgagctcctacccaaaccccgtggcccacctgcccgccgacgagctggtctccaagaagcggaataagaggaggaaaaaccggcccccgggggctgcagataacacagcctgggctgtcatgaccccccaggagctctggaagaacatctgccaggaggccaagaactactttgacttcgacctcgagtgtgagaccgtggaccaggctgtggagacctacggcctgcagaagataacgctcctgcgggagatctcgctgaaaacagggatccaggtcctgctgaaggagtacagcttcgacagtcgccacaagcccgcgttcaccgaggaggacgtgctcaacatcttccccgtggtcaagcacgtcaaccccaaggcctcggatgccttccatttcttccagagcgggcaggccaaagtgcagcagggcttcctgaaggagggctgtgagctcatcaatgaggccctgaacctgtttaacaacgtctacggagccatgcacgtggagacctgcgcctgcctgcgcctcctcgcccgcctccactacatcatgggcgactacgcagaggccctgagtaaccagcagaaggcggtgctgatgagcgagcgggtgatgggcaccgagcaccccaacaccatccaggaatacatgcacctggccctgtactgcttcgccagcagccagctgtccaccgccctgagcctgctgtaccgcgcccgctacctcatgctgctggtgttcggggaagaccaccccgagatggcgctgctggacaacaacatcgggctggtgctgcacggggtgatggagtacgacctgtcgctgcgcttcctggagaacgcgctggccgtcagcaccaagtaccacgggcccaaggccctcaaggtggccctcagccaccaccttgtcgcccgagtctacgagagcaaagctgagttccggtcggccctgcagcacgagaaggagggttacaccatctacaagacgcagctgggcgaggaccatgagaagaccaaggaaagctccgagtacctcaagtgcctgacccagcaggccgtggccctgcagcgcaccatgaacgagatctaccgcaacggctccagcgccaacatcccgcccctcaagttcacggcccccagcatggccagcgtcttggagcagctgaacgtcattaacggcatcctcttcattcctctcagccaaaaagacctggagaatctgaaagccgaggtggcgcggcggcaccagctccaggaggccagcagaaacagggatagagccgaggagcccatggctaccgagcccgcgccagcgggggccccaggagacctgggctcccagcccccggctgccaaggacccttctccgagcgtgcagggatagagagggagccagacggacagccagccagcggccccgtcaccagggagcccgactgcgggagaagggggcgagcctgcgggcggaagaggaagcaaggccctcttcctccacgtctcaccccaccccacccccgtgtcctcctgggagcctggcctgcctgccccgcagaaggtgtttttgcgctggttcaatgaatagatgatgcagaggccccattggagacacgtgaatggcgtgtgcggccggcgtgtgcgagtgcgcccctggctgtgagtgttgaccgttcctctcccctgtacatagcccgagccagtcctgagtgggtgactcctgagtgggtgacgcgcagacgggatttctcaggtcatttgtatggtcgacatgatggctgctgctttggctgccaccacccccgggcccagcctgtctgaaagttcagggtttaggccgaaaaacccggtggggaggggtggggagccggagctctgtggcggggctggagggctggggtgcactttagtttggggcgggacgggagccgccgttgtgactggcgtggtctggctgctgctcccgaacggaggggtcggggttggcttgctgggccctcagagcccagtgggtggctctgactcggctccctactccctgcacccagctgggcgcagccttggggcctgcggtctgaatgtatccctcccctcagttttaacctgagctgccgaacgcacagtgggccgggggcgaggctgggggaagcggggcccaattacggatcccgggagttacaggtgccgacgtgatgtcgcttctctggtgcccagctcccttcctggtctgagactagctctgggggtggcgggggcccccacacgctgctcccgctccaccctgcccgtgctgctgctctgtgcctgctgtcagagccctggtgggggaggatgtggccaccctgagacccggaggagacgggcgtctgcctgggtttgcggagagccgcttatgggtgtggtccgtccagacaccttgtttcaagggggatgggcgtgagcgggcaagcagagcatccccaccgctgagcaagaactttttcttgtttttaaaccatcacgtcctcatttcacattggaataaagtgagtttttgaaacctgcggcc

SEQ ID NO: 7 - DNA, 3245 bp, Homo Sapiens
cgggaggcggagcctagggaagcaaattctcctggcggcctccgttcagacgcggcagctgtgacccacctgcctcctccgcagagcaatggcggtgtctgccgggtccgcgcggacctcgcccagctcagataaagtacagaaagacaaggctgaactgatctcagggcccaggcaggacagccgaatagggaaactcttgggttttgagtggacagatttgtccagttggcggaggctggtgaccctgctgaatcgaccaacggaccctgcaagcttagctgtctttcgttttctttttgggttcttgatggtgctagacattccccaggagcgggggctcagctctctggaccggaaataccttgatgggctggatgtgtgccgcttccccttgctggatgccctacgcccactgccacttgactggatgtatcttgtctacaccatcatgtttctgggggcactgggcatgatgctgggcctgtgctaccggataagctgtgtgttattcctgctgccatactggtatgtgtttctcctggacaagacatcatggaacaaccactcctatctgtatgggttgttggcctttcagctaacattcatggatgcaaaccactactggtctgtggacggtctgctgaatgcccataggaggaatgcccacgtgcccctttggaactatgcagtgctccgtggccagatcttcattgtgtacttcattgcgggtgtgaaaaagctggatgcagactgggttgaaggctattccatggaatatttgtcccggcactggctcttcagtcccttcaaactgctgttgtctgaggagctgactagcctgctggtcgtgcactggggtgggctgctgcttgacctctcagctggtttcctgctcttttttgatgtctcaagatccattggcctgttctttgtgtcctacttccactgcatgaattcccagcttttcagcattggtatgttctcctacgtcatgctggccagcagccctctcttctgctcccctgagtggcctcggaagctggtgtcctactgcccccgaaggttgcaacaactgttgcccctcaaggcagcccctcagcccagtgtttcctgtgtgtataagaggagccggggcaaaagtggccagaagccagggctgcgccatcagctgggagctgccttcaccctgctctacctcctggagcagctattcctgccctattctcattttctcacccagggctataacaactggacaaatgggctgtatggctattcctgggacatgatggtgcactcccgctcccaccagcacgtgaagatcacctaccgtgatggccgcactggcgaactgggctaccttaaccctggggtatttacacagagtcggcgatggaaggatcatgcagacatgctgaagcaatatgccacttgcctgagccgcctgcttcccaagtataatgtcactgagccccagatctactttgatatttgggtctccatcaatgaccgcttccagcagaggatttttgaccctcgtgtggacatcgtgcaggccgcttggtcaccctttcagcgcacatcctgggtgcaaccactcttgatggacctgtctccctggagggccaagttacaggaaatcaagagcagcctagacaaccacactgaggtggtcttcattgcagatttccctggactgcacttggagaattttgtgagtgaagacctgggcaacactagcatccagctgctgcagggggaagtgactgtggagcttgtggcagaacagaagaaccagactcttcgagagggagaaaaaatgcagttgcctgctggtgagtaccataaggtgtatacgacatcacctagcccttcttgctacatgtacgtctatgtcaacactacagagcttgcactggagcaagacctggcatatctgcaagaattaaaggaaaaggtggagaatggaagtgaaacagggcctctacccccagagctgcagcctctgttggaaggggaagtaaaagggggccctgagccaacacctctggttcagacctttcttagacgccaacaaaggctccaggagattgaacgccggcgaaatactcctttccatgagcgattcttccgcttcttgttgcgaaagctctatgtctttcgccgcagcttcctgatgacttgtatctcacttcgaaatctgatattaggccgtccttccctggagcagctggcccaggaggtgacttatgcaaacttgagaccctttgaggcagttggagaactgaatccctcaaacacggattcttcacattctaatcctcctgagtcaaatcctgatcctgtccactcagagttctgaagggggccagatgttgggtgcagatgtagaagcagccagtcacagacccattctatgcaatggacatttatttgaaaaaaattctcaaaagttttttttttttttttgggggggcggggttctaaagctgtttttaactccgagattacaacttagaggaaccaaggaaataaagcaaataagatttaacaacccaagattaagaggccaggaagaggttagacgcaatgtgaaactgtcctcctaggataaggtttaaagtggctttttgggggctgggtgccgtggctcacgcctgtaatcccagcattttgggaggctgaggtgggcagatcacttgaggccaggagttcgagaccagcctggccaacatggcaaaaccccttctctactaaaaatacaaaaattagccagacgtggtggtgggtgcctgtaatccaactacccaggaggctgaggcatgagaatcgcttgggcccaggaggtggaggttgcagtgagccgagatcgagccactgcactcctgggcaacagagcaagacttcgtctcaaaataaataaataaagtggctcttggggaaaagcaatttaatgtaccacgatgaatagctaactgttcccaagtgtttgctatgtgcaacacaccgcgtgagcagtgttacctgcattattacattaggctgagaggtaaaataatttgcccgaagacatacagctagtgacgaatggactgatggtttgaacttaacgtctatttgacttaaggtcctgcaccctgccacttgtaattttcagaatcactgataatctgaaataatgcagcttaaaacatgttttcttaattaaaagtataattggatggtggtcaggttgtaaatgc

SEQ ID NO: 8 - DNA, 2360 bp, Homo Sapiens
gcggccgcgcagtgtggttcagcccggactccgcggggcgagctgcccttcctcccccgacccccgcgcaagtggtgcattggcgcgcggcgccgaggggcggggcccgagccgggcgcgcgcgggcgctgctctataaataccgggccgcaccgcccgctgcttcgttcgctccgcgccgcccgcctgctacgagtagaacgctgtccgcagcttgcgcatttcgcagccgctgccgcctcgccgctgctccttcgtaaggccacttccgcacaccgacaccaacatgaacggacagctcaacggcttccacgaggcgttcatcgaggagggcacattccttttcacctcagagtcggtcggggaaggccacccagataagatttgtgaccaaatcagtgatgctgtccttgatgcccaccttcagcaggatcctgatgccaaagtagcttgtgaaactgttgctaaaactggaatgatccttcttgctggggaaattacatccagagctgctgttgactaccagaaagtggttcgtgaagctgttaaacacattggatatgatgattcttccaaaggttttgactacaagacttgtaacgtgctggtagccttggagcaacagtcaccagatattgctcaaggtgttcatcttgacagaaatgaagaagacattggtgctggagaccagggcttaatgtttggctatgccactgatgaaactgaggagtgtatgcctttaaccattgtcttggcacacaagctaaatgccaaactggcagaactacgccgtaatggcactttgccttggttacgccctgattctaaaactcaagttactgtgcagtatatgcaggatcgaggtgctgtgcttcccatcagagtccacacaattgttatatctgttcagcatgatgaagaggtttgtcttgatgaaatgagggatgccctaaaggagaaagtcatcaaagcagttgtgcctgcgaaataccttgatgaggatacaatctaccacctacagccaagtggcagatttgttattggtgggcctcagggtgatgctggtttgactggacgcaaaatcattgtggacacttatggcggttggggtgctcatggaggaggtgccttttcaggaaaggattataccaaggtcgaccgttcagctgcttatgctgctcgttgggtggcaaaatcccttgttaaaggaggtctgtgccggagggttcttgttcaggtctcttatgctattggagtttctcatccattatctatctccattttccattatggtacctctcagaagagtgagagagagctattagagattgtgaagaagaatttcgatctccgccctggggtcattgtcagggatctggatctgaagaagccaatttatcagaggactgcagcctatggccactttggtagggacagcttcccatgggaagtgcccaaaaagcttaaatattgaaagtgttagccttttttccccagacttgttggcgtaggctacagagaagccttcaagctctgagggaaagggccctccttcctaaattttcctgtcctctttcagctcctgaccagttgcagtcactctagtcaatgacatgaattttagcttttgtgggggactgtaagttgggcttgctattctgtccctaggtgttttgttcaccattataatgaatttagtgagcataggtgatccatgtaactgcctagaaacaacactgtagtaaataatgctttgaaattgaacctttgtgccctatcacccaacgctccaaagtcataattgcattgactttccccaccagatgctgaaaatgtccttgtgatgtgcacgtaaagtacttgtagttccacttatagcctctgtctggcaatgccacagccctgtcagcatgaatttgtaatgtcttgagctctattatgaatgtgaagccttccccttatcctccctgtaacttgatccatttctaattatgtagctctttgtcagggagtgttccctatccaatcaatcttgcatgtaacgcaagttcccagttggagctccagcctgacatcaaaaaaggcagttaccattaaaccatctccctggtgcttatgctcttaattgccacctctaacagcaccaaatcaaaatctctccactttcagctgtcttttggaggacgtacgtaataaggttttaatttagtaaaccaatcctatgcatggtttcagcactagccaaacctcaccaactcctagttctatacctgagggtctgtaggttgcacactttggtaccagataacttttttttttctttataagaaagcctgagtactccacactgcacaataact

SEQ ID NO: 9 - DNA, 4726 bp, Homo Sapiens
gcggccgcgcagtgtggttcagcccggactccgcggggcgagctgcccttcctcccccgacccccgcgcaagtggtgcattggcgcgcggcgccgaggggcggggcccgagccgggcgcgcgcgggcgctgctctataaataccgggccgcaccgcccgctgcttcgttcgctccgcgccgcccgcctgctacgagtagaacgctgtccgcagcttgcgcatttcgcagccgctgccgcctcgccgctgctccttcgtaaggccacttccgcacaccgacaccaacatgaacggacagctcaacggcttccacgaggcgttcatcgaggagggcacattccttttcacctcagagtcggtcggggaaggccacccagataagatttgtgaccaaatcagtgatgctgtccttgatgcccaccttcagcaggatcctgatgccaaagtagcttgtgaaactgttgctaaaactggaatgatccttcttgctggggaaattacatccagagctgctgttgactaccagaaagtggttcgtgaagctgttaaacacattggatatgatgattcttccaaaggttttgactacaagacttgtaacgtgctggtagccttggagcaacagtcaccagatattgctcaaggtgttcatcttgacagaaatgaagaagacattggtgctggagaccaggtatcttggtgtagaggctgttttaatctcttctaacattaaattctggagcttgatcacattggtgacttttctttctttagggcttaatgtttggctatgccactgatgaaactgaggagtgtatgcctttaaccattgtcttggcacacaagctaaatgccaaactggcagaactacgccgtaatggcactttgccttggttacgccctgattctaaaactcaagtaagtgatgatcataaagcttggttgtctcatttattacatcagcacagaagatccataattttgataatagctaactggaaaaaatagcatttgttttcctatattgtaacttcaggtagagaaacaaatacaaagttattgtttggtatgatgttctgatgacctgtgttgccttcaaggttactgtgcagtatatgcaggatcgaggtgctgtgcttcccatcagagtccacacaattgttatatctgttcagcatgatgaagaggtttgtcttgatgaaatgagggatgccctaaaggagaaagtcatcaaagcagttgtgcctgcgaaataccttgatgaggatacaatctaccacctacagccaagtggcagatttgttattggtgggcctcaggtaatgtcattttgttgcatttttctggatttttgatggttacttaaaattttggctactacatttttttcaggctttctgaaacctacatgtgaatcatcggaggatatttgctgaatgaattcagaataggcaacctaatccacttggaaagcactaggcgtaaagtaacttaaatcctgtaatttcagggtgatgctggtttgactggacgcaaaatcattgtggacacttatggcggttggggtgctcatggaggaggtgccttttcaggaaaggattataccaaggtcgaccgttcagctgcttatgctgctcgttgggtggcaaaatcccttgttaaaggaggtctgtgccggagggttcttgttcaggtatacactctttatataacgaacgattaaaagtcatgtaagtgggagggtatttagtagtaatctacttaactacttgttttataccaacgtattatacaagtatatgggtctttgcaatcactgattcttacgacatttgaatccttttaggtctcttatgctattggagtttctcatccattatctatctccattttccattatggtacctctcagaagagtgagagagagctattagagattgtgaagaagaatttcgatctccgccctggggtcattgtcaggtaaagatggtaaagcctgttgctagtcaagtattgagggtgttgggtgtgtgtgtatatacttaaggctgaggaggtgaaggtgtgaaggaagactcctcaaatgggaatatattttaattcctggaacagttttgaactgctgccttagtgaagacttagttatttgagaaatttaaaattacggtgctccatggcttaggctaaccactctagagaatgttccagatttgatatttgagctttgtgctcttctacttaagggtgttaagaaaatagagataaagtgggttgctcaaggtttgttgcaatgtaaaaaccatggtagggtgtgggcggcgggaccttggtaagtattgtgtgatctcaggtgagctttttgacaattgaaatttctcagaataatgacaagttttcgtatttgttgagccagggacggaaaaacaactatagttactaataaggactgtgcaaggagtttggacaccagggaagtaacacttttgccacaaatttttttcctagcatatcccagagaactcatttgccagagctcttgaaaatgagtcttgctgattgttttgctttattttaatttaatgctacatattaagttacggacttgtatattccagggatctggatctgaagaagccaatttatcagaggactgcagcctatggccactttggtagggacagcttcccatgggaagtgcccaaaaagcttaaatattgaaagtgttagccttttttccccagacttgttggcgtaggctacagagaagccttcaagctctgagggaaagggccctccttcctaaattttcctgtcctctttcagctcctgaccagttgcagtcactctagtcaatgacatgaattttagcttttgtgggggactgtaagttgggcttgctattctgtccctaggtgttttgttcaccattataatgaatttagtgagcataggtgatccatgtaactgcctagaaacaacactgtagtaaataatgctttgaaattgaacctttgtgccctatcacccaacgctccaaagtcataattgcattgactttccccaccagatgctgaaaatgtccttgtgatgtgcacgtaaagtacttgtagttccacttatagcctctgtctggcaatgccacagccctgtcagcatgaatttgtaatgtcttgagctctattatgaatgtgaagccttccccttatcctccctgtaacttgatccatttctaattatgtagctctttgtcagggagtgttccctatccaatcaatcttgcatgtaacgcaagttcccagttggagctccagcctgacatcaaaaaaggcagttaccattaaaccatctccctggtgcttatgctcttaattgccacctctaacagcaccaaatcaaaatctctccactttcagctgtcttttggaggacgtacgtaataaggttttaatttagtaaaccaatcctatgcatggtttcagcactagccaaacctcaccaactcctagttctagaaaaacaggcacttggcagccttgtgatgtcatacagagaagtcacagggcagtacctgagggtctgtaggttgcacactttggtaccagataacttttttttttctttataagaaagcctgagtactccacactgcacaataactcctcccagggttttaactttgttttattttcaaaaccaggtccaatgagctttctgaacagctggtgtagctacagagaaaccagcttccttcagagagcagtgcttttggcggggaggaggaaatcccttcatacttgaacgttttctaattgcttatttattgtattctggggtatggcgtaagtacagagaagccatcacctcagatggcagcttttaaaagattttttttttttctctcaacaccatgattcctttaacaacatgtttccagcattcccaggtaggccaaggtgtcctacagaaaaaccttgggttagacctacagggggtctggctggtgttaacagaagggagggcagagctggtgcggctggccatggagaaagctgacttggctggtgtggtacagagaagccagcttgtttacatgcttattccatgactgcttgccctaagcagaaagtgcctttcaggatctatttttggaggtttattacgtatgtctggttctcaattccaacagtttaatgaagatctaaataaaatgctaggttctaccttaactgtgtctgttactcatttgttaaagtgctttggggccataggtacgtgcctataatcccaacactttgaaaggctgaggtaggaggatcactttaacatagaagttggaggctgtagcgaaccattatcaagccactgcactccagcctgggtgactgagactttggctcttaaaaaatgctatcatatgaataacctgagaatactatatgtgtatctttaaccttgaattgtaatccataattagccataattcaggaaaataacctcaatccctagacccagtgggtgggcattttttaaaagcctaagcaagatttagtcctcctagtccacttaagccaaaattcatgtgtccttattgcagcagccattcaatgccatttttaagttttcaactaaggttgagggcttcaaaccattgaaggcataaaaaccgctaaaagtattaacctggaagtggtaatgtctatctaaagtcctggcaatttaagcctat

SEQ ID NO: 10 - DNA, 3615 bp, Homo Sapiens
gcggccgcgcagtgtggttcagcccggactccgcggggcgagctgcccttcctcccccgacccccgcgcaagtggtgcattggcgcgcggcgccgaggggcggggcccgagccgggcgcgcgcgggcgctgctctataaataccgggccgcaccgcccgctgcttcgttcgctccgcgccgcccgcctgctacgagtagaacgctgtccgcagcttgcgcatttcgcagccgctgccgcctcgccgctgctccttcgtaaggccacttccgcacaccgacaccaacatgaacggacagctcaacggcttccacgaggcgttcatcgaggagggcacattccttttcacctcagagtcggtcggggaaggccacccagataagatttgtgaccaaatcagtgatgctgtccttgatgcccaccttcagcaggatcctgatgccaaagtagcttgtgaaactgttgctaaaactggaatgatccttcttgctggggaaattacatccagagctgctgttgactaccagaaagtggttcgtgaagctgttaaacacattggatatgatgattcttccaaaggttttgactacaagacttgtaacgtgctggtagccttggagcaacagtcaccagatattgctcaaggtgttcatcttgacagaaatgaagaagacattggtgctggagaccagggcttaatgtttggctatgccactgatgaaactgaggagtgtatgcctttaaccattgtcttggcacacaagctaaatgccaaactggcagaactacgccgtaatggcactttgccttggttacgccctgattctaaaactcaagttactgtgcagtatatgcaggatcgaggtgctgtgcttcccatcagagtccacacaattgttatatctgttcagcatgatgaagaggtttgtcttgatgaaatgagggatgccctaaaggagaaagtcatcaaagcagttgtgcctgcgaaataccttgatgaggatacaatctaccacctacagccaagtggcagatttgttattggtgggcctcagggtgatgctggtttgactggacgcaaaatcattgtggacacttatggcggttggggtgctcatggaggaggtgccttttcaggaaaggattataccaaggtcgaccgttcagctgcttatgctgctcgttgggtggcaaaatcccttgttaaaggaggtctgtgccggagggttcttgttcaggtctcttatgctattggagtttctcatccattatctatctccattttccattatggtacctctcagaagagtgagagagagctattagagattgtgaagaagaatttcgatctccgccctggggtcattgtcaggtaaagatggtaaagcctgttgctagtcaagtattgagggtgttgggtgtgtgtgtatatacttaaggctgaggaggtgaaggtgtgaaggaagactcctcaaatgggaatatattttaattcctggaacagttttgaactgctgccttagtgaagacttagttatttgagaaatttaaaattacggtgctccatggcttaggctaaccactctagagaatgttccagatttgatatttgagctttgtgctcttctacttaagggtgttaagaaaatagagataaagtgggttgctcaaggtttgttgcaatgtaaaaaccatggtagggtgtgggcggcgggaccttggtaagtattgtgtgatctcaggtgagctttttgacaattgaaatttctcagaataatgacaagttttcgtatttgttgagccagggacggaaaaacaactatagttactaataaggactgtgcaaggagtttggacaccagggaagtaacacttttgccacaaatttttttcctagcatatcccagagaactcatttgccagagctcttgaaaatgagtcttgctgattgttttgctttattttaatttaatgctacatattaagttacggacttgtatattccagggatctggatctgaagaagccaatttatcagaggactgcagcctatggccactttggtagggacagcttcccatgggaagtgcccaaaaagcttaaatattgaaagtgttagccttttttccccagacttgttggcgtaggctacagagaagccttcaagctctgagggaaagggccctccttcctaaattttcctgtcctctttcagctcctgaccagttgcagtcactctagtcaatgacatgaattttagcttttgtgggggactgtaagttgggcttgctattctgtccctaggtgttttgttcaccattataatgaatttagtgagcataggtgatccatgtaactgcctagaaacaacactgtagtaaataatgctttgaaattgaacctttgtgccctatcacccaacgctccaaagtcataattgcattgactttccccaccagatgctgaaaatgtccttgtgatgtgcacgtaaagtacttgtagttccacttatagcctctgtctggcaatgccacagccctgtcagcatgaatttgtaatgtcttgagctctattatgaatgtgaagccttccccttatcctccctgtaacttgatccatttctaattatgtagctctttgtcagggagtgttccctatccaatcaatcttgcatgtaacgcaagttcccagttggagctccagcctgacatcaaaaaaggcagttaccattaaaccatctccctggtgcttatgctcttaattgccacctctaacagcaccaaatcaaaatctctccactttcagctgtcttttggaggacgtacgtaataaggttttaatttagtaaaccaatcctatgcatggtttcagcactagccaaacctcaccaactcctagttctagaaaaacaggcacttggcagccttgtgatgtcatacagagaagtcacagggcagtacctgagggtctgtaggttgcacactttggtaccagataacttttttttttctttataagaaagcctgagtactccacactgcacaataactcctcccagggttttaactttgttttattttcaaaaccaggtccaatgagctttctgaacagctggtgtagctacagagaaaccagcttccttcagagagcagtgcttttggcggggaggaggaaatcccttcatacttgaacgttttctaattgcttatttattgtattctggggtatggcgtaagtacagagaagccatcacctcagatggcagcttttaaaagattttttttttttctctcaacaccatgattcctttaacaacatgtttccagcattcccaggtaggccaaggtgtcctacagaaaaaccttgggttagacctacagggggtctggctggtgttaacagaagggagggcagagctggtgcggctggccatggagaaagctgacttggctggtgtggtacagagaagccagcttgtttacatgcttattccatgactgcttgccctaagcagaaagtgcctttcaggatctatttttggaggtttattacgtatgtctggttctcaattccaacagtttaatgaagatctaaataaaatgctaggttctacctt

SEQ ID NO: 11 - DNA, 3482 bp, Homo Sapiens
gcggccgcgcagtgtggttcagcccggactccgcggggcgagctgcccttcctcccccgacccccgcgcaagtggtgcattggcgcgcggcgccgaggggcggggcccgagccgggcgcgcgcgggcgctgctctataaataccgggccgcaccgcccgctgcttcgttcgctccgcgccgcccgcctgctacgagtagaacgctgtccgcagcttgcgcatttcgcagccgctgccgcctcgccgctgctccttcgtaaggccacttccgcacaccgacaccaacatgaacggacagctcaacggcttccacgaggcgttcatcgaggagggcacattccttttcacctcagagtcggtcggggaaggccacccagataagatttgtgaccaaatcagtgatgctgtccttgatgcccaccttcagcaggatcctgatgccaaagtagcttgtgaaactgttgctaaaactggaatgatccttcttgctggggaaattacatccagagctgctgttgactaccagaaagtggttcgtgaagctgttaaacacattggatatgatgattcttccaaaggttttgactacaagacttgtaacgtgctggtagccttggagcaacagtcaccagatattgctcaaggtgttcatcttgacagaaatgaagaagacattggtgctggagaccagggcttaatgtttggctatgccactgatgaaactgaggagtgtatgcctttaaccattgtcttggcacacaagctaaatgccaaactggcagaactacgccgtaatggcactttgccttggttacgccctgattctaaaactcaagttactgtgcagtatatgcaggatcgaggtgctgtgcttcccatcagagtccacacaattgttatatctgttcagcatgatgaagaggtttgtcttgatgaaatgagggatgccctaaaggagaaagtcatcaaagcagttgtgcctgcgaaataccttgatgaggatacaatctaccacctacagccaagtggcagatttgttattggtgggcctcagggtgatgctggtttgactggacgcaaaatcattgtggacacttatggcggttggggtgctcatggaggaggtgccttttcaggaaaggattataccaaggtcgaccgttcagctgcttatgctgctcgttgggtggcaaaatcccttgttaaaggaggtctgtgccggagggttcttgttcaggtctcttatgctattggagtttctcatccattatctatctccattttccattatggtacctctcagaagagtgagagagagctattagagattgtgaagaagaatttcgatctccgccctggggtcattgtcagggatctggatctgaagaagccaatttatcagaggactgcagcctatggccactttggtagggacagcttcccatgggaagtgcccaaaaagcttaaatattgaaagtgttagccttttttccccagacttgttggcgtaggctacagagaagccttcaagctctgagggaaagggccctccttcctaaattttcctgtcctctttcagctcctgaccagttgcagtcactctagtcaatgacatgaattttagcttttgtgggggactgtaagttgggcttgctattctgtccctaggtgttttgttcaccattataatgaatttagtgagcataggtgatccatgtaactgcctagaaacaacactgtagtaaataatgctttgaaattgaacctttgtgccctatcacccaacgctccaaagtcataattgcattgactttccccaccagatgctgaaaatgtccttgtgatgtgcacgtaaagtacttgtagttccacttatagcctctgtctggcaatgccacagccctgtcagcatgaatttgtaatgtcttgagctctattatgaatgtgaagccttccccttatcctccctgtaacttgatccatttctaattatgtagctctttgtcagggagtgttccctatccaatcaatcttgcatgtaacgcaagttcccagttggagctccagcctgacatcaaaaaaggcagttaccattaaaccatctccctggtgcttatgctcttaattgccacctctaacagcaccaaatcaaaatctctccactttcagctgtcttttggaggacgtacgtaataaggttttaatttagtaaaccaatcctatgcatggtttcagcactagccaaacctcaccaactcctagttctagaaaaacaggcacttggcagccttgtgatgtcatacagagaagtcacagggcagtacctgagggtctgtaggttgcacactttggtaccagataacttttttttttctttataagaaagcctgagtactccacactgcacaataactcctcccagggttttaactttgttttattttcaaaaccaggtccaatgagctttctgaacagctggtgtagctacagagaaaccagcttccttcagagagcagtgcttttggcggggaggaggaaatcccttcatacttgaacgttttctaattgcttatttattgtattctggggtatggcgtaagtacagagaagccatcacctcagatggcagcttttaaaagattttttttttttctctcaacaccatgattcctttaacaacatgtttccagcattcccaggtaggccaaggtgtcctacagaaaaaccttgggttagacctacagggggtctggctggtgttaacagaagggagggcagagctggtgcggctggccatggagaaagctgacttggctggtgtggtacagagaagccagcttgtttacatgcttattccatgactgcttgccctaagcagaaagtgcctttcaggatctatttttggaggtttattacgtatgtctggttctcaattccaacagtttaatgaagatctaaataaaatgctaggttctaccttaactgtgtctgttactcatttgttaaagtgctttggggccataggtacgtgcctataatcccaacactttgaaaggctgaggtaggaggatcactttaacatagaagttggaggctgtagcgaaccattatcaagccactgcactccagcctgggtgactgagactttggctcttaaaaaatgctatcatatgaataacctgagaatactatatgtgtatctttaaccttgaattgtaatccataattagccataattcaggaaaataacctcaatccctagacccagtgggtgggcattttttaaaagcctaagcaagatttagtcctcctagtccacttaagccaaaattcatgtgtccttattgcagcagccattcaatgccatttttaagttttcaactaaggttgagggcttcaaaccattgaaggcataaaaaccgctaaaagtattaacctggaagtggtaatgtctatctaaagtcctggcaatttaagcctat

SEQ ID NO: 12 - DNA, 1154 bp, Homo Sapiens
tggagcaagcaggaagtgaactgagggccaccctgggaggaagccgactaggcgaattcacttactgaccggcctgggctgctctgagacatggaggaagccagtgaaggtggaggaaatgatcgtgtgcggaacctgcaaagtgaggtggagggagttaagaatattatgacccagaatgtggagcggatcctggcccggggggaaaacttggaacatctccgcaacaagacagaggatctggaagccacatctgagcacttcaagacgacatcgcagaaggtggctcgaaaattctggtggaagaacgtgaagatgattgtccttatctgcgtgattgtttttatcatcatcctcttcattgtgctctttgccactggtgccttctcttaagtaacagggaacctctcccacctgcccttctcttcagggacaaccctccataaatgtgtgccaagagggtctcctttcctgtcttcctctacagagaatgctgctcggtcctcctacccctcttcccgaggccctgctgccatgttgtatgccccagaaggcaggaatagagttggagcggtgccagcagcaggcgaacgaggtgacggaaattatgcgtaacaacttcggcaaggtcctggagcgtggtgtgaagctggccgaactgcagcagcgttcagaccaactcctggatatgagctcaaccttcaacaagactacacagaacctggcccagaagaagtgctgggagaacatccgttaccggatctgcgtggggctggtggtggttggtgtcctgctcatcatcctgattgtgctgctggtcgtctttctccctcagagcagtgacagcagtagtgccccacggacccaggatgcaggcattgcctcagggcctgggaactgacccagctggtcctgaaggagaagccaaatggctgcactggccgattctggtctccagaggaccttggtgtttgctctcccttgacccaccccagtgagtgccaaagggcagccccaacatgtgcacccctgcatttcctgtcatgccacagactggcccttgagggcagcctgctgtactggccatgctgggccagccccacctggagctcagtaaaaactgctgtttgattaaaagctggtatctgtgtgtg

SEQ ID NO: 13 - DNA, 862 bp, Homo Sapiens
tggagcaagcaggaagtgaactgagggccaccctgggaggaagccgactaggcgaattcacttactgaccggcctgggctgctctgagacatggaggaagccagtgaaggtggaggaaatgatcgtgtgcggaacctgcaaagtgaggtggagggagttaagaatattatgacccagaatgtggagcggatcctggcccggggggaaaacttggaacatctccgcaacaagacagaggatctggaagccacatctgagcacttcaagacgacatcgcagaaggtggctcgaaaattctggtggaagaacgtgaagatgattgtccttatctgcgtgattgtttttatcatcatcctcttcattgtgctctttgccactggtgccttctcttaagtaacagggaacctctcccacctgcccttctcttcagggacaaccctccataaatgtgtgccaagagggtctcctttcctgtcttcctctacagagaatgctgctcggtcctcctacccctcttcccgaggccctgctgccatgttgtatgccccagaaggtaccttggtcccccggaaggagagaaaaaagagagatggactgtggctgcatttcttgggtccttagagtgggctggagagacctagagggcccagcatgtggctgggaaactgttggtggccagtgggtaataaagacctttcagtatccctatatgtgtgaggcactttctctcttcccattttgcctttggcttttctatttcttttcttcctgaggataccttctggctaaaattctctcatctgaggtccaagttgttggaagggcaaagagtatatgtttggagaagaaagttggagccccc

SEQ ID NO: 14 - DNA, 1790 bp, Homo Sapiens
agacagagggagcagtgaatagcaatagggtgtttccaccatggtcttcactcaggccccggctgaaatcatgggccacctccagatacgcagcctcctggcccggcagtgcctggcagagtttctgggtgtgtttgtactcatgctcctcacccaaggagctgtggcccaggctgtcaccagtggagaaaccaaaggcaacttcttcaccatgtttctggctggctctctggccgttacgatagccatctacgtgggtggtaacgtctcaggggcccacctgaatccagccttctccctggccatgtgcatcgttggacgcctcccctgggtcaagctccccatttacatcttggtgcagttgctgtctgctttctgtgcttcgggagccacctatgttctctaccatgatgccctacagaactatacaggtgggaacctgacagtgactggccccaaggagacagcctccatttttgccacctatcctgccccctatctgtccctgaacaatggcttcctggatcaggttctgggcactgggatgctgattgtggggctcttggccatcctggacagacggaacaagggagtccctgcgggtctggagcctgtggtggtggggatgctgatcctggccctcgggttatccatgggtgccaactgcgggattccactcaaccctgcccgggacctgggcccacgtctcttcacctacgtggctggctggggtcctgaagtcttcagtgctggtaatggctggtggtgggtgcctgtggtggcccctctggtgggggccaccgttggcacagccacttaccagctgttggtggctctgcaccaccctgagggcccagagccagctcaggatctggtgtctgctcaacacaaagcctcagagttggaaactcctgcctcagctcagatgctggagtgtaagctatgattaggacaaccctcacttcactcatggaccctggagccagccactgaccccgcctgggaacaacagtcattcttcctctttgttaatgtgccagaacctgggaggcttctctgtttatctgtttggcatcccttcctcctaaactaagaaggatcctggacagggagaagtggaggaggataaggtaccaggactcaggcttctcatcccctcctcccgcaaagcggttttctgaccctcagggcctctcggaatgtagttgctcgaggtaaccgctagagggtgcgcacctggatgctggatggggacggctgcgggcatctgcagggtggagggggccaccatccagtgtagggcacaaccctggggactgccctccatagcctgtcccgactgccgactcctagctctcatcgcctcggcgcctcccaccttcaccctctcggggatgcctccccaagagggtagttaggggtggggaagccgcctccacccagggggcgtggtgggggcggagggaaggagggcggcggggcacagagacagagagcaaggctgtgaaactgaggcaccgttcctagacatctcggtgctgtgtcgttcattcaaggagagttgagatacagtgaaatgagccagggcgaggagggagggtgaaggaacggagggcgggcggctccgaggagcgagagtcgggctgagggcaacctggcgccagggaaaattctggttattcaccacttctacagctctcctgccgctccctgcagaggatgctcgttttgcagagaaggcagtgttcctctattcccttcttccgaattaaaaataccccctcagagcg

SEQ ID NO: 15 - DNA, 1651 bp, Homo Sapiens
cagtgaatagcaatagggtgtttccaccatggtcttcactcaggccccggctgaaatcatgggccacctccagatacgcagcctcctggcccggcagtgcctggcagagtttctgggtgtgtttgtactcatggggcccacctgaatccagccttctccctggccatgtgcatcgttggacgcctcccctgggtcaagctccccatttacatcttggtgcagttgctgtctgctttctgtgcttcgggagccacctatgttctctaccatgatgccctacagaactatacaggtgggaacctgacagtgactggccccaaggagacagcctccatttttgccacctatcctgccccctatctgtccctgaacaatggcttcctggatcaggttctgggcactgggatgctgattgtggggctcttggccatcctggacagacggaacaagggagtccctgcgggtctggagcctgtggtggtggggatgctgatcctggccctcgggttatccatgggtgccaactgcgggattccactcaaccctgcccgggacctgggcccacgtctcttcacctacgtggctggctggggtcctgaagtcttcagtgctggtaatggctggtggtgggtgcctgtggtggcccctctggtgggggccaccgttggcacagccacttaccagctgttggtggctctgcaccaccctgagggcccagagccagctcaggatctggtgtctgctcaacacaaagcctcagagttggaaactcctgcctcagctcagatgctggagtgtaagctatgattaggacaaccctcacttcactcatggaccctggagccagccactgaccccgcctgggaacaacagtcattcttcctctttgttaatgtgccagaacctgggaggcttctctgtttatctgtttggcatcccttcctcctaaactaagaaggatcctggacagggagaagtggaggaggataaggtaccaggactcaggcttctcatcccctcctcccgcaaagcggttttctgaccctcagggcctctcggaatgtagttgctcgaggtaaccgctagagggtgcgcacctggatgctggatggggacggctgcgggcatctgcagggtggagggggccaccatccagtgtagggcacaaccctggggactgccctccatagcctgtcccgactgccgactcctagctctcatcgcctcggcgcctcccaccttcaccctctcggggatgcctccccaagagggtagttaggggtggggaagccgcctccacccagggggcgtggtgggggcggagggaaggagggcggcggggcacagagacagagagcaaggctgtgaaactgaggcaccgttcctagacatctcggtgctgtgtcgttcattcaaggagagttgagatacagtgaaatgagccagggcgaggagggagggtgaaggaacggagggcgggcggctccgaggagcgagagtcgggctgagggcaacctggcgccagggaaaattctggttattcaccacttctacagctctcctgccgctccctgcagaggatgctcgttttgcagagaaggcagtgttcctctattcccttcttccgaattaaaaataccccctcagagcg

SEQ ID NO: 16 - DNA, 2265 bp, Homo Sapiens
agacagagggagcagtgaatagcaatagggtgtttccaccatggtcttcactcaggccccggctgaaatcatgggccacctccagatacgcagcctcctggcccggcagtgcctggcagagtttctgggtgtgtttgtactcatgctcctcacccaaggagctgtggcccaggctgtcaccagtggagaaaccaaaggcaacttcttcaccatgtttctggctggctctctggccgttacgatagccatctacgtgggtggtaacgtctcaggggcccacctgaatccagccttctccctggccatgtgcatcgttggacgcctcccctgggtcaagctccccatttacatcttggtgcagttgctgtctgctttctgtgcttcgggagccacctatgttctctaccatgatgccctacagaactatacaggtgggaacctgacagtgactggccccaaggagacagcctccatttttgccacctatcctgccccctatctgtccctgaacaatggcttcctggatcaggttctgggcactgggatgctgattgtggggctcttggccatcctggacagacggaacaagggagtccctgcgggtctggagcctgtggtggtggggatgctgatcctggccctcgggttatccatgggtgccaactgcgggattccactcaaccctgcccgggacctgggcccacgtctcttcacctacgtggctggctggggtcctgaagtcttcaggtgggagacagactctcctggtgctggcctccactcaccttcctctgctaagggctctgtccctgggtccacagcactctgcctttaaaatagctctcttggcttcttaggacagtgttctttctccaagtcatattctccccctttctcccttgcttccctcccaacttttcactgaaacagtaagatttagaggttgtgttcttaggcatgccacattacttccatgcacattagtgacttcatcagcaaaattaatatattcagataattccctaaggcaagaggctggaccaagctctcctggggttccctcttctaaatactatgctttggtgacaaggcaatcctcttcctggtgtctaccaccctgggaacaactttagggcactctcttgttactgccccccgtccttggagaggggaaggctaagggagtcactcctgataccttcccactgtccttcttttgcagtgctggtaatggctggtggtgggtgcctgtggtggcccctctggtgggggccaccgttggcacagccacttaccagctgttggtggctctgcaccaccctgagggcccagagccagctcaggatctggtgtctgctcaacacaaagcctcagagttggaaactcctgcctcagctcagatgctggagtgtaagctatgattaggacaaccctcacttcactcatggaccctggagccagccactgaccccgcctgggaacaacagtcattcttcctctttgttaatgtgccagaacctgggaggcttctctgtttatctgtttggcatcccttcctcctaaactaagaaggatcctggacagggagaagtggaggaggataaggtaccaggactcaggcttctcatcccctcctcccgcaaagcggttttctgaccctcagggcctctcggaatgtagttgctcgaggtaaccgctagagggtgcgcacctggatgctggatggggacggctgcgggcatctgcagggtggagggggccaccatccagtgtagggcacaaccctggggactgccctccatagcctgtcccgactgccgactcctagctctcatcgcctcggcgcctcccaccttcaccctctcggggatgcctccccaagagggtagttaggggtggggaagccgcctccacccagggggcgtggtgggggcggagggaaggagggcggcggggcacagagacagagagcaaggctgtgaaactgaggcaccgttcctagacatctcggtgctgtgtcgttcattcaaggagagttgagatacagtgaaatgagccagggcgaggagggagggtgaaggaacggagggcgggcggctccgaggagcgagagtcgggctgagggcaacctggcgccagggaaaattctggttattcaccacttctacagctctcctgccgctccctgcagaggatgctcgttttgcagagaaggcagtgttcctctattcccttcttccgaattaaaaataccccctcagagcg

SEQ ID NO: 17 - DNA, 4726 bp, Homo Sapiens
ccgaaactgacacaaagtagcgggccgaggccccgggggagcggggccgcagctgggggggcgggagcccgtggggagccgagccgagcgccccccgccccagcccccggcatgggcagtacggggccgccggggcgggcgccgagcgctgagcgctgagggtctcccatgggattgctgggatcttgctgggtgagatggcagtgtgtgcaaaaaagcgccccccagaagaagaaaggagggcgcgggctaatgaccgagaatacaatgagaaattccagtatgcgagtaactgcatcaagacctccaagtacaatattctcaccttcctgcctgtcaacctctttgagcagttccaggaagttgccaacacttacttcctgttcctcctcattctgcagttgatcccccagatctcttccctgtcctggttcaccaccattgtgcctttggttcttgtcctcaccatcacagctgttaaagatgccactgatgactatttccgccacaagagcgataaccaggtgaataaccgccagtctcaggtgctgatcaatggaatcctccagcaggagcagtggatgaatgtctgtgttggtgatattatcaagctagaaaataaccagtttgtggcggctgtagactggaccttaagcagtggaattcttgtctcctgttcaggtgaagtgatctgtgaacctcccaacaacaaactggacaaattcagcggaaccctctactggaaggaaaataagttccctctgagcaaccagaacatgctgctgcggggctgtgtgctgcgaaacaccgagtggtgcttcgggctggtcatctttgcaggtcccgacactaagctgatgcaaaacagcggcagaacaaagttcaaaagaacgagtatcgatcgcctaatgaataccctggtgctctggatttttggattcctggtttgcatgggggtgatcctggccattggcaatgccatctgggagcacgaggtggggatgcgtttccaggtctacctgccgtgggatgaggcagtggacagtgccttcttctctggcttcctctccttctggtcctacatcatcatcctcaacaccgttgtgcccatttcactctatgtcagtgtggaggtcatccgtctgggccacagctacttcatcaactgggataagaagatgttctgcatgaagaagcggacgcctgcagaagcccgcaccaccaccctaaacgaggagctgggccaggtggagtacatcttctccgacaagacgggcaccctcacccagaacatcatggttttcaacaagtgctccatcaatggccacagctatggtgatgtgtttgacgtcctgggacacaaagctgaattgggagagaggcctgaacctgttgacttctccttcaatcctctggctgacaagaagttcttattttgggaccccagcctgctggaggctgtcaagatcggggacccccacacgcatgagttcttccgcctcctttccctgtgtcatactgtcatgtcagaagaaaagaacgaaggagagctgtactacaaagctcagtccccagatgagggggccctggtcaccgcagccaggaactttggttttgttttccgctctcgcacccccaaaacaatcaccgtccatgagatgggcacagccatcacctaccagctgctggccatcctggacttcaacaacatccgcaagcggatgtcggtcatagtgcggaatccagaggggaagatccgactctactgcaaaggggctgacactatcctactggacagactgcaccactccactcaagagctgctcaacaccaccatggaccaccttaatgagtacgcaggggaagggctgaggaccctggtgctggcctacaaggatctggatgaagagtactacgaggagtgggctgagcgacgcctccaggccagcctggcccaggacagccgggaggacaggctggctagcatctatgaggaggttgagaacaacatgatgctgctgggtgcaacggccattgaggacaaacttcagcaaggggttccagagaccattgccctcctgacactggccaacatcaagatttgggtgctaaccggagacaagcaagagacggctgtgaacatcggctattcctgcaagatgctgacggatgacatgactgaggttttcatagtcactggccatactgtcctggaggtgcgggaggagctcaggaaagcccgggagaagatgatggactcatcccgctccgtaggcaacggcttcacctatcaggacaagctttcttcttccaagctaacttctgtcctggaggccgttgctggggagtacgccctggtcataaatggtcacagcctggcccacgcactggaggcagacatggagctggagtttctggagacagcgtgtgcctgcaaagctgtcatctgctgccgggtgacccccttgcagaaggcacaggtggtagaactggtcaagaagtacaagaaggctgtgacgcttgccattggagacggagccaatgatgtcagcatgatcaaaacggctcacattggtgtggggatcagtgggcaggaagggatccaggctgtcttggcctccgattactccttctcccagttcaagttcctgcagcgcctcctgctggtgcatgggcgctggtcctacctgcgaatgtgcaagtttctttgctatttcttctacaaaaactttgctttcaccatggtccacttctggtttggcttcttctgtggcttctcagcccagaccgtctatgaccagtatttcatcaccctgtataacatcgtgtacacctccctgccagtcctggctatgggggtctttgatcaggatgtccccgagcagcggagcatggagtaccctaagctgtatgagccgggccagctgaaccttctcttcaacaagcgggagttcttcatctgcatcgcccagggcatctacacctccgtgctcatgttcttcattccctatggggtgtttgctgatgccacccgggatgatggcactcagctggctgactaccagtcctttgcagtcactgtggccacatccttggtcattgtggttagcgtgcagattgggctcgacacaggctactggacggccatcaaccacttcttcatctggggaagccttgctgtttactttgccatcctctttgccatgcacagcaatgggctcttcgacatgtttcccaaccagttccggtttgtggggaatgcccagaacaccttggcccagcccacggtgtggctgaccattgtgctcaccacagtcgtctgcatcatgcccgtggttgccttccgattcctcaggctcaacctgaagccggatctctccgacacggtccgctacacacagctcgtgaggaagaagcagaaggcccagcaccgctgcatgcggcgggttggccgcactggctcccggcgctccggctatgccttctcccatcaggagggcttcggggagctcatcatgtctggcaagaacatgcggctgagctctctcgcgctctccagcttcaccacccgctccagctccagctggattgagagcctgcgcaggaagaagagtgacagtgccagtagccccagtggcggtgccgacaagcccctcaagggctgaaggccgaggatggatgccctgtgccagtgaccagagcacccagggctggccagtcactgagggaacagcgtctcggaactgctggtcctcattccttgcttcccgtccccccggtagactctgtcctgctggtcccaccacacatggctgggacatctgttcccagctgtaggcccttccaccagctggggagctagagggagcaggcccaagggcagagcagaggctgaggcacggggagccagccccactcggggaccagaagtggaaccaaaaacaagaaaaaactgtgagagattgtgtctgcccctgccctgcctgggacccacagggagactataatctccttatttttttactcctactccccagaggggccctagtgcctctgttcctgaattacataagaatgtaccatgccgggaagccagagacctgcaggggcctcggcccctcacatcgtgtatgtctctccttgatttgtgttgtgtccagtttggttttgtctttttttatttggcaagtggaggaggcttttatgtgacttttatgttgtggttggtgtcttaactctcctgggaaaaggaggctggcacacactgggatgccgcagcctggccggctgtggggtggtttgggaggatccatgtcggctctgcctgcagtgaccagtgctctgtggggcagaggagctgaccagggagggaggtacccatgagcagagggtagtgggagagtgtaaaggagggtttggtcctgtctgcttcctcaccttgagagtaaagtgctgccctctgcccccaacacacacacatatcaattcctggattccttagtcctgctggccttgggctggagcctaggaaagtggcccccaaatccttagtgagctaaagctgggtctgaaatttggtcagtggggaggggtagttttcttttcttttttctttttctttttttctttttttttttgagatggagtctcactcttgtcacctaggcaagagtgcaatggcacaatctcagctcactgcaacctccacctcctgggttcaagcgat

SEQ ID NO: 18 - DNA, 1143 bp, Homo Sapiens
atgacggtccccaaggagatgcccgagaagtgggcccgggcccaggcgcctccctcttggagccgaaagaagccctcttgggggacagaagaagaaaggagggcgcgggctaatgaccgagaatacaatgagaaattccagtatgcgagtaactgcatcaagacctccaagtacaatattctcaccttcctgcctgtcaacctctttgagcagttccaggaagttgccaacacttacttcctgttcctcctcattctgcagttgatcccccagatctcttccctgtcctggttcaccaccattgtgcctttggttcttgtcctcaccatcacagctgttaaagatgccactgatgactatttccgccacaagagcgataaccaggtgaataaccgccagtctcaggtgctgatcaatggaatcctccagcaggagcagtggatgaatgtctgtgttggtgatattatcaagctagaaaataaccagtttgtggcggcggatctcctcctcctttccagcagtgagccccatgggctgtgttacatagagacagcagaacttgatggcgagaccaacatgaaagtacgtcaggcgattccagtcacctcagaattgggagacatcagtaagcttgccaagtttgacggtgaagtgatctgtgaacctcccaacaacaaactggacaaattcagcggaaccctctactggaaggaaaataagttccctctgagcaaccagaacatgctgctgcggggctgtgtgctgcgaaacaccgagtggtgcttcgggctggtcatctttgcaggtcccgacactaagctgatgcaaaacagcggcagaacaaagttcaaaagaacgagtatcgatcgcctaatgaataccctggtgctctggatttttggattcctggtttgcatgggggtgatcctggccattggcaatgccatctgggagcacgaggtggggatgcgtttccaggtctacctgccgtgggatgaggcagtggacagtgccttcttctctggcttcctctccttctggtcctacatcatcatcctcaacaccgttgtgcccatttcactctatgtcagtcctgagtgtggaggtcatccgtctgggccacagctacttcatcaactggga

SEQ ID NO: 19 - DNA, 4753 bp, Homo Sapiens
ccgaaactgacacaaagtagcgggccgaggccccgggggagcggggccgcagctgggggggcgggagcccgtggggagccgagccgagcgccccccgccccagcccccggcatgggcagtacggggccgccggggcgggcgccgagcgctgagcgctgagggtctcccatgggattgctgggatcttgctgggtgagatggcagtgtgtgcaaaaaagcgccccccagaagaagaaaggagggcgcgggctaatgaccgagaatacaatgagaaattccagtatgcgagtaactgcatcaagacctccaagtacaatattctcaccttcctgcctgtcaacctctttgagcagttccaggaagttgccaacacttacttcctgttcctcctcattctgcagttgatcccccagatctcttccctgtcctggttcaccaccattgtgcctttggttcttgtcctcaccatcacagctgttaaagatgccactgatgactatttccgccacaagagcgataaccaggtgaataaccgccagtctcaggtgctgatcaatggaatcctccagcaggagcagtggatgaatgtctgtgttggtgatattatcaagctagaaaataaccagtttgtggcggctgtagactggaccttaagcagtggaattcttgtctcctgttcaggtgaagtgatctgtgaacctcccaacaacaaactggacaaattcagcggaaccctctactggaaggaaaataagttccctctgagcaaccagaacatgctgctgcggggctgtgtgctgcgaaacaccgagtggtgcttcgggctggtcatctttgcaggtcccgacactaagctgatgcaaaacagcggcagaacaaagttcaaaagaacgagtatcgatcgcctaatgaataccctggtgctctggatttttggattcctggtttgcatgggggtgatcctggccattggcaatgccatctgggagcacgaggtggggatgcgtttccaggtctacctgccgtgggatgaggcagtggacagtgccttcttctctggcttcctctccttctggtcctacatcatcatcctcaacaccgttgtgcccatttcactctatgtcagtgtggaggtcatccgtctgggccacagctacttcatcaactgggataagaagatgttctgcatgaagaagcggacgcctgcagaagcccgcaccaccaccctaaacgaggagctgggccaggtggagtacatcttctccgacaagacgggcaccctcacccagaacatcatggttttcaacaagtgctccatcaatggccacagctatggtgatgtgtttgacgtcctgggacacaaagctgaattgggagagaggcctgaacctgttgacttctccttcaatcctctggctgacaagaagttcttattttgggaccccagcctgctggaggctgtcaagatcggggacccccacacgcatgagttcttccgcctcctttccctgtgtcatactgtcatgtcagaagaaaagaacgaaggagagctgtactacaaagctcagtccccagatgagggggccctggtcaccgcagccaggaactttggttttgttttccgctctcgcacccccaaaacaatcaccgtccatgagatgggcacagccatcacctaccagctgctggccatcctggacttcaacaacatccgcaagcggatgtcggtcatagtgcggaatccagaggggaagatccgactctactgcaaaggggctgacactatcctactggacagactgcaccactccactcaagagctgctcaacaccaccatggaccaccttaatgtgggtgagtacgcaggggaagggctgaggaccctggtgctggcctacaaggatctggatgaagagtactacgaggagtgggctgagcgacgcctccaggccagcctggcccaggacagccgggaggacaggctggctagcatctatgaggaggttgagaacaacatgatggaatccttgtggtattttcagctgctgggtgcaacggccattgaggacaaacttcagcaaggggttccagagaccattgccctcctgacactggccaacatcaagatttgggtgctaaccggagacaagcaagagacggctgtgaacatcggctattcctgcaagatgctgacggatgacatgactgaggttttcatagtcactggccatactgtcctggaggtgcgggaggagctcaggaaagcccgggagaagatgatggactcatcccgctccgtaggcaacggcttcacctatcaggacaagctttcttcttccaagctaacttctgtcctggaggccgttgctggggagtacgccctggtcataaatggtcacagcctggcccacgcactggaggcagacatggagctggagtttctggagacagcgtgtgcctgcaaagctgtcatctgctgccgggtgacccccttgcagaaggcacaggtggtagaactggtcaagaagtacaagaaggctgtgacgcttgccattggagacggagccaatgatgtcagcatgatcaaaacggctcacattggtgtggggatcagtgggcaggaagggatccaggctgtcttggcctccgattactccttctcccagttcaagttcctgcagcgcctcctgctggtgcatgggcgctggtcctacctgcgaatgtgcaagtttctttgctatttcttctacaaaaactttgctttcaccatggtccacttctggtttggcttcttctgtggcttctcagcccagaccgtctatgaccagtatttcatcaccctgtataacatcgtgtacacctccctgccagtcctggctatgggggtctttgatcaggatgtccccgagcagcggagcatggagtaccctaagctgtatgagccgggccagctgaaccttctcttcaacaagcgggagttcttcatctgcatcgcccagggcatctacacctccgtgctcatgttcttcattccctatggggtgtttgctgatgccacccgggatgatggcactcagctggctgactaccagtcctttgcagtcactgtggccacatccttggtcattgtggttagcgtgcagattgggctcgacacaggctactggacggccatcaaccacttcttcatctggggaagccttgctgtttactttgccatcctctttgccatgcacagcaatgggctcttcgacatgtttcccaaccagttccggtttgtggggaatgcccagaacaccttggcccagcccacggtgtggctgaccattgtgctcaccacagtcgtctgcatcatgcccgtggttgccttccgattcctcaggctcaacctgaagccggatctctccgacacggtccgctacacacagctcgtgaggaagaagcagaaggcccagcaccgctgcatgcggcgggttggccgcactggctcccggcgctccggctatgccttctcccatcaggagggcttcggggagctcatcatgtctggcaagaacatgcggctgagctctctcgcgctctccagcttcaccacccgctccagctccagctggattgagagcctgcgcaggaagaagagtgacagtgccagtagccccagtggcggtgccgacaagcccctcaagggctgaaggccgaggatggatgccctgtgccagtgaccagagcacccagggctggccagtcactgagggaacagcgtctcggaactgctggtcctcattccttgcttcccgtccccccggtagactctgtcctgctggtcccaccacacatggctgggacatctgttcccagctgtaggcccttccaccagctggggagctagagggagcaggcccaagggcagagcagaggctgaggcacggggagccagccccactcggggaccagaagtggaaccaaaaacaagaaaaaactgtgagagattgtgtctgcccctgccctgcctgggacccacagggagactataatctccttatttttttactcctactccccagaggggccctagtgcctctgttcctgaattacataagaatgtaccatgccgggaagccagagacctgcaggggcctcggcccctcacatcgtgtatgtctctccttgatttgtgttgtgtccagtttggttttgtctttttttatttggcaagtggaggaggcttttatgtgacttttatgttgtggttggtgtcttaactctcctgggaaaaggaggctggcacacactgggatgccgcagcctggccggctgtggggtggtttgggaggatccatgtcggctctgcctgcagtgaccagtgctctgtggggcagaggagctgaccagggagggaggtacccatgagcagagggtagtgggagagtgtaaaggagggtttggtcctgtctgcttcctcaccttgagagtaaagtgctgccctctgcccccaacacacacacatatcaattcctggattccttagtcctgctggccttgggctggagcctaggaaagtggcccccaaatccttagtgagctaaagctgggtctgaaatttggtcagtggggaggggtagttttcttttcttttttctttttctttttttctttttttttttgagatggagtctcactcttgtcacctaggcaagagtgcaatggcacaatctcagctcactgcaacctccacctcctgggttcaagcgat

SEQ ID NO: 20 - DNA, 3414 bp, Homo Sapiens
caggtactcacaaccccgaacgttcagactgacatagaaacacaggcacagaacacctccgatcatcacggacccacaaagggcctccagcgaagaccagcccaccgtgtctggcacgcactcgcgagcgggcgttcgcgggtgtggccggcagcaaatggagaaacccttggcagcgcccggacgccctccagtggcggctcctgagaaccggggacagttcaatccgggccacaaacttttttagaacaaatcattgtgggaagctgggaggagagagagagagaggaagtcggacgtgggcgaggggcggggtgtctggactggaacctctgggcccacatgccatggacaatattaccaggcagaaccaattctacgatacccaagtcatcaaacaagaaaacgagtcaggctacgagaggagaccactggaaatggagcagcagcaggcctatcgtccagaaatgaagacagagatgaagcaaggagcacccaccagcttcctcccgcctgaagcttctcaactcaagccagacaggcagcaattccagagtcgaaagaggccttatgaagaaaaccggggacgggggtactttgagcaccgagaggataggaggggccgctctcctcagcctcctgctgaagaggatgaagatgactttgatgatacccttgttgctattgacacctataactgcgacctccacttcaaggtggcccgagatcggagtagtggctatccgctcacaattgagggctttgcatacctgtggtcaggagcccgtgccagctatggggtcagaaggggccgtgtatgcttcgagatgaagatcaatgaggaaatctccgtgaagcaccttccgtctacagagcctgacccccacgtggtccgtatcggctggtccctggactcctgcagcacccagctaggcgaagagcctttctcctatggctatggaggcactgggaagaagtccaccaatagccggtttgaaaactacggagacaagtttgcagagaacgatgtgattggctgctttgcggattttgaatgtggaaatgacgtggaactgtcttttaccaagaatggaaagtggatgggcattgctttccgaatccagaaggaagccttggggggtcaggccctctatcctcatgtcctggtgaagaattgcgcagtggagttcaacttcggacagagagcagagccctactgttctgtcctcccggggtttaccttcatccagcaccttccccttagtgagcgtatccggggcaccgttggaccaaagagcaaggcagaatgtgagattctgatgatggtgggcctgcctgctgctggcaagaccacatgggccatcaaacatgcagcctccaacccttccaagaagtacaacatcctgggtaccaatgccatcatggataagatgcgggtgatgggcctacgccggcagcggaactatgctggccgctgggatgtcctgatccagcaggccacccagtgcctcaaccgcctcatccagattgctgcccgcaagaaacgcaactatatcctagatcagacaaatgtttatgggtcagcccagagacgaaaaatgagaccatttgaaggcttccagcgcaaagctattgtaatttgtcccactgacgaggacctaaaagaccgaacaataaagcgaaccgacgaggaagggaaggatgtcccagatcatgcggtcttagaaatgaaagccaacttcacgttgccagatgttggggacttcctggatgaggttctgttcattgagctgcagcgggaggaagcggacaagctagtgaggcagtacaacgaggaaggccgcaaggctgggccaccccctgaaaagcgctttgacaaccgaggtggtggtggcttccggggccgcgggggtggtggtggcttccagcgctatgaaaaccgaggaccccctggaggcaaccgtggcggcttccagaaccgagggggaggcagcggtggaggaggcaactaccgaggaggtttcaaccgcagcggaggtggtggctatagccagaaccgctggggtaacaacaaccgggataacaacaactccaacaacagaggcagctacaaccgggctccccagcaacagccgccaccacagcagcctccgccaccacagccaccaccccagcagccaccgccaccacccagctacagccctgctcggaaccccccaggggccagcacctacaataagaacagcaacatccctggctcaagcgccaataccagcacccccaccgtcagcagctacagccctccacagccgagttacagccagccaccctacaaccagggaggttacagccagggctacacagccccaccgcctccacctccaccaccacctgcctacaactatgggagctacggcggttacaacccggccccctataccccaccgccaccccccaccgcacagacctaccctcagcccagctataaccagtatcagcagtatgcccagcagtggaaccagtactatcagaaccagggccagtggccgccatactacgggaactacgactacgggagctactccgggaacacacagggtggcacaagtacacagtagccagtgtgacccagaggctcccggaggcccctgccggcttcctccaccagcgcctgcctcggcccctcctctgcccccgccagatcccgtggtgctggggatggggtcatcccagggctgcctccctccagcccactgcctcccctctgaggggcttccttcccctccatagggccaggcatttttttctggattcaaacaggcaacaatgaccttttattttctgtttgtccccacctccccagccttccacctcctgttcttcctaccttcttcctttttgactaaataatccccacctcccttgatcatacagtgaggctacagtgactgaggggagaatcccctcctgttcactctcccaaccctgctccagcccctcagcttcccagaccctcatgcagttggttgtaaattctcccaggagctgttttactgtctacttttcaggattaaaaaaaaaatcaaaacttaaaaaaaaaaaagtttaaaaagcaaaatggggagggggaggaagcagtgacttttttttggtaattatgcgcttttttttaatttttagaatttgtctttttactgtgggtgggctgttgatatttcatcaagataagcatttctttcctgagttcaggtgactgaggaagagccacaaaacaaaacttccccataactttgcacacaagcttctgtgttcagttgaattgtaactgctttttgtatttggagagagtgactattgaacttgaaaccttttattccgggcgtcttggtagtttctggtgggattcagtgggtg

SEQ ID NO: 21 - protein, 397 aa, Homo sapiens
MRNATSALGPELRCLGAAVHPDPEHSQAKVSLACVGRRLVCGARRAVEKSERIRMEAVATATAAKEPDKGCIEPGPGHWGELSRTPVPSKPQDKVEAAEATPVALDSDTSGAENAAVSAMLHAVAASRLPVCSQQQGEPDLTEHEKVAILAQLYHEKPLVFLERFRTGLREEHLACFGHVRGDHRADFYCAEVARQGTARPRTLRTRLRNRRYAALRELIQGGEYFSDEQMRFRAPLLYEQYIGQYLTQEELSARTPTHQPPKPGSPGRPACPLSNLLLQSYEERELQQRLLQQQEEEEACLEEEEEEEDSDEEDQRSGKDSEAWVPDSEERLILREEFTSRMHQRFLDGKDGDFDYSTVDDNPDFDNLDIVARDEEERYFDEEEPEDAPSPELDGD

SEQ ID NO: 22 - protein, 186 aa, Homo sapiens
CGFWCWQWAAQSTPTGPAVGCVLSGLTGTLSPSRSCSVCTSPSSPPATGTGPAAPTEPSIGPPTAAALGWPLPGLATRAAPAGRGPAGFLGPVEQQYASRHAGTEGAVSSLAAAAALQDGGVTLASQMWMNAVLGGAAVPSAASTPPAVTGASVGRGTACLQTVHSVCPREGPPGWPPTRQEWTVQ

SEQ ID NO: 23 - protein, 186 aa, Homo sapiens; identical to SEQ ID NO: 22

SEQ ID NO: 24 - protein, 186 aa, Homo sapiens; identical to SEQ ID NO: 22

SEQ ID NO: 25 - protein, 958 aa, Homo sapiens [sequence omitted]

SEQ ID NO: 26 - protein, 1318 aa, Homo sapiens
MLLNGDCPESLKKEAAAAEPPRENGLDEAGPGDETTGQEVIVIQDTGFSVKILAPGIEPFSLQVSPQEMVQEIHQVLMDREDTCHRTCFSLHLDGNVLDHFSELRSVEGLQEGSVLRVVEEPYTVREARIHVRHVRDLLKSLDPSDAFNGVDCNSLSFLSVFTDGDLGDSGKRKKGLEMDPIDCTPPEYILPGSRERPLCPLQPQNRDWKPLQCLKVLTMSGWNPPPGNRKMHGDLMYLFVITAEDRQVSITASTRGFYLNQSTAYHFNPKPASPRFLSHSLVELLNQISPTFKKNFAVLQKKRVQRHPFERIATPFQVYSWTAPQAEHAMDCVRAEDAYTSRLGYEEHIPGQTRDWNEELQTTRELPRKNLPERLLRERAIFKVHSDFTAAATRGAMAVIDGNVMAINPSEETKMQMFIWNNIFFSLGFDVRDHYKDFGGDVAAYVAPTNDLNGVRTYNAVDVEGLYTLGTVVVDYRGYRVTAQSIIPGILERDQEQSVIYGSIDFGKTVVSHPRYLELLERTSRPLKILRHQVLNDRDEEVELCSSVECKGIIGNDGRHYILDLLRTFPPDLNFLPVPGEELPEECARAGFPRAHRHKLCCLRQELVDAFVEHRYLLFMKLAALQLMQQNASQLETPSSLENGGPSSLESKSEDPPGQEAGSEEEGSSASGLAKVKELAETIAADDGTDPRSREVIRNACKAVGSISSTAFDIRFNPDIFSPGSLSALPPPGVRFPESCQDEVRDQKQLLKDAAAFLLSCQIPGLVKDCMEHAVLPVDGATLAEVMRQRGINMRYLGKVLELVLRSPARHQLDHVFKIGIGELITRSAKHIFKTYLQGVELSGLSAAISHFLNCFLSSYPNPVAHLPADELVSKKRNKRRKNRPPGAADNTAWAVMTPQELWKNICQEAKNYFDFDLECETVDQAVETYGLQKITLLREISLKTGIQVLLKEYSFDSRHKPAFTEEDVLNIFPVVKHVNPKASDAFHFFQSGQAKVQQGFLKEGCELINEALNLFNNVYGAMHVETCACLRLLARLHYIMGDYAEALSNQQKAVLMSERVMGTEHPNTIQEYMHLALYCFASSQLSTALSLLYRARYLMLLVFGEDHPEMALLDNNIGLVLHGVMEYDLSLRFLENALAVSTKYHGPKALKVALSHHLVARVYESKAEFRSALQHEKEGYTIYKTQLGEDHEKTKESSEYLKCLTQQAVALQRTMNEIYRNGSSANIPPLKFTAPSMASVLEQLNVINGILFIPLSQKDLENLKAEVARRHQLQEASRNRDRAEEPMATEPAPAGAPGDLGSQPPAAKDPSPSVQG

SEQ ID NO: 27 - protein, 758 aa, Homo sapiens
MAVSAGSARTSPSSDKVQKDKAELISGPRQDSRIGKLLGFEWTDLSSWRRLVTLLNRPTDPASLAVFRFLFGFLMVLDIPQERGLSSLDRKYLDGLDVCRFPLLDALRPLPLDWMYLVYTIMFLGALGMMLGLCYRISCVLFLLPYWYVFLLDKTSWNNHSYLYGLLAFQLTFMDANHYWSVDGLLNAHRRNAHVPLWNYAVLRGQIFIVYFIAGVKKLDADWVEGYSMEYLSRHWLFSPFKLLLSEELTSLLVVHWGGLLLDLSAGFLLFFDVSRSIGLFFVSYFHCMNSQLFSIGMFSYVMLASSPLFCSPEWPRKLVSYCPRRLQQLLPLKAAPQPSVSCVYKRSRGKSGQKPGLRHQLGAAFTLLYLLEQLFLPYSHFLTQGYNNWTNGLYGYSWDMMVHSRSHQHVKITYRDGRTGELGYLNPGVFTQSRRWKDHADMLKQYATCLSRLLPKYNVTEPQIYFDIWVSINDRFQQRIFDPRVDIVQAAWSPFQRTSWVQPLLMDLSPWRAKLQEIKSSLDNHTEVVFIADFPGLHLENFVSEDLGNTSIQLLQGEVTVELVAEQKNQTLREGEKMQLPAGEYHKVYTTSPSPSCYMYVYVNTTELALEQDLAYLQELKEKVENGSETGPLPPELQPLLEGEVKGGPEPTPLVQTFLRRQQRLQEIERRRNTPFHERFFRFLLRKLYVFRRSFLMTCISLRNLILGRPSLEQLAQEVTYANLRPFEAVGELNPSNTDSSHSNPPESNPDPVHSEF

SEQ ID NO: 28 - protein, 395 aa, Homo sapiens
MNGQLNGFHEAFIEEGTFLFTSESVGEGHPDKICDQISDAVLDAHLQQDPDAKVACETVAKTGMILLAGEITSRAAVDYQKVVREAVKHIGYDDSSKGFDYKTCNVLVALEQQSPDIAQGVHLDRNEEDIGAGDQGLMFGYATDETEECMPLTIVLAHKLNAKLAELRRNGTLPWLRPDSKTQVTVQYMQDRGAVLPIRVHTIVISVQHDEEVCLDEMRDALKEKVIKAVVPAKYLDEDTIYHLQPSGRFVIGGPQGDAGLTGRKIIVDTYGGWGAHGGGAFSGKDYTKVDRSAAYAARWVAKSLVKGGLCRRVLVQVSYAIGVSHPLSISIFHYGTSQKSERELLEIVKKNFDLRPGVIVRDLDLKKPIYQRTAAYGHFGRDSFPWEVPKKLKY

SEQ ID NO: 29 - protein, 146 aa, Homo sapiens
MNGQLNGFHEAFIEEGTFLFTSESVGEGHPDKICDQISDAVLDAHLQQDPDAKVACETVAKTGMILLAGEITSRAAVDYQKVVREAVKHIGYDDSSKGFDYKTCNVLVALEQQSPDIAQGVHLDRNEEDIGAGDQVSWCRGCFNLF

SEQ ID NO: 30 - protein, 362 aa, Homo sapiens
MNGQLNGFHEAFIEEGTFLFTSESVGEGHPDKICDQISDAVLDAHLQQDPDAKVACETVAKTGMILLAGEITSRAAVDYQKVVREAVKHIGYDDSSKGFDYKTCNVLVALEQQSPDIAQGVHLDRNEEDIGAGDQGLMFGYATDETEECMPLTIVLAHKLNAKLAELRRNGTLPWLRPDSKTQVTVQYMQDRGAVLPIRVHTIVISVQHDEEVCLDEMRDALKEKVIKAVVPAKYLDEDTIYHLQPSGRFVIGGPQGDAGLTGRKIIVDTYGGWGAHGGGAFSGKDYTKVDRSAAYAARWVAKSLVKGGLCRRVLVQVSYAIGVSHPLSISIFHYGTSQKSERELLEIVKKNFDLRPGVIVR

SEQ ID NO: 31 - protein, 395 aa, Homo sapiens; identical to SEQ ID NO: 28

SEQ ID NO: 32 - protein, 136 aa, Homo sapiens
MLLGPPTPLPEALLPCCMPQKAGIELERCQQQANEVTEIMRNNFGKVLERGVKLAELQQRSDQLLDMSSTFNKTTQNLAQKKCWENIRYRICVGLVVVGVLLIILIVLLVVFLPQSSDSSSAPRTQDAGIASGPGN

SEQ ID NO: 33 - protein, 100 aa, Homo sapiens
MEEASEGGGNDRVRNLQSEVEGVKNIMTQNVERILARGENLEHLRNKTEDLEATSEHFKTTSQKVARKFWWKNVKMIVLICVIVFIIILFIVLFATGAFS

SEQ ID NO: 34 - protein, 301 aa, Homo sapiens [sequence omitted]

SEQ ID NO: 35 - protein, 213 aa, Homo sapiens
MCIVGRLPWVKLPIYILVQLLSAFCASGATYVLYHDALQNYTGGNLTVTGPKETASIFATYPAPYLSLNNGFLDQVLGTGMLIVGLLAILDRRNKGVPAGLEPVVVGMLILALGLSMGANCGIPLNPARDLGPRLFTYVAGWGPEVFSAGNGWWWVPVVAPLVGATVGTATYQLLVALHHPEGPEPAQDLVSAQHKASELETPASAQMLECKL

SEQ ID NO: 36 - protein, 264 aa, Homo sapiens [sequence omitted]

SEQ ID NO: 37 - protein, 1155 aa, Homo sapiens
MAVCAKKRPPEEERRARANDREYNEKFQYASNCIKTSKYNILTFLPVNLFEQFQEVANTYFLFLLILQLIPQISSLSWFTTIVPLVLVLTITAVKDATDDYFRHKSDNQVNNRQSQVLINGILQQEQWMNVCVGDIIKLENNQFVAAVDWTLSSGILVSCSGEVICEPPNNKLDKFSGTLYWKENKFPLSNQNMLLRGCVLRNTEWCFGLVIFAGPDTKLMQNSGRTKFKRTSIDRLMNTLVLWIFGFLVCMGVILAIGNAIWEHEVGMRFQVYLPWDEAVDSAFFSGFLSFWSYIIILNTVVPISLYVSVEVIRLGHSYFINWDKKMFCMKKRTPAEARTTTLNEELGQVEYIFSDKTGTLTQNIMVFNKCSINGHSYGDVFDVLGHKAELGERPEPVDFSFNPLADKKFLFWDPSLLEAVKIGDPHTHEFFRLLSLCHTVMSEEKNEGELYYKAQSPDEGALVTAARNFGFVFRSRTPKTITVHEMGTAITYQLLAILDFNNIRKRMSVIVRNPEGKIRLYCKGADTILLDRLHHSTQELLNTTMDHLNEYAGEGLRTLVLAYKDLDEEYYEEWAERRLQASLAQDSREDRLASIYEEVENNMMLLGATAIEDKLQQGVPETIALLTLANIKIWVLTGDKQETAVNIGYSCKMLTDDMTEVFIVTGHTVLEVREELRKAREKMMDSSRSVGNGFTYQDKLSSSKLTSVLEAVAGEYALVINGHSLAHALEADMELEFLETACACKAVICCRVTPLQKAQVVELVKKYKKAVTLAIGDGANDVSMIKTAHIGVGISGQEGIQAVLASDYSFSQFKFLQRLLLVHGRWSYLRMCKFLCYFFYKNFAFTMVHFWFGFFCGFSAQTVYDQYFITLYNIVYTSLPVLAMGVFDQDVPEQRSMEYPKLYEPGQLNLLFNKREFFICIAQGIYTSVLMFFIPYGVFADATRDDGTQLADYQSFAVTVATSLVIVVSVQIGLDTGYWTAINHFFIWGSLAVYFAILFAMHSNGLFDMFPNQFRFVGNAQNTLAQPTVWLTIVLTTVVCIMPVVAFRFLRLNLKPDLSDTVRYTQLVRKKQKAQHRCMRRVGRTGSRRSGYAFSHQEGFGELIMSGKNMRLSSLALSSFTTRSSSSWIESLRRKKSDSASSPSGGADKPLKG

SEQ ID NO: 38 - protein, 381 aa, Homo sapiens
MTVPKEMPEKWARAQAPPSWSRKKPSWGTEEERRARANDREYNEKFQYASNCIKTSKYNILTFLPVNLFEQFQEVANTYFLFLLILQLIPQISSLSWFTTIVPLVLVLTITAVKDATDDYFRHKSDNQVNNRQSQVLINGILQQEQWMNVCVGDIIKLENNQFVAADLLLLSSSEPHGLCYIETAELDGETNMKVRQAIPVTSELGDISKLAKFDGEVICEPPNNKLDKFSGTLYWKENKFPLSNQNMLLRGCVLRNTEWCFGLVIFAGPDTKLMQNSGRTKFKRTSIDRLMNTLVLWIFGFLVCMGVILAIGNAIWEHEVGMRFQVYLPWDEAVDSAFFSGFLSFWSYIIILNTVVPISLYVSPECGGHPSGPQLLHQLG

SEQ ID NO: 39 - protein, 1164 aa, Homo sapiens
MAVCAKKRPPEEERRARANDREYNEKFQYASNCIKTSKYNILTFLPVNLFEQFQEVANTYFLFLLILQLIPQISSLSWFTTIVPLVLVLTITAVKDATDDYFRHKSDNQVNNRQSQVLINGILQQEQWMNVCVGDIIKLENNQFVAAVDWTLSSGILVSCSGEVICEPPNNKLDKFSGTLYWKENKFPLSNQNMLLRGCVLRNTEWCFGLVIFAGPDTKLMQNSGRTKFKRTSIDRLMNTLVLWIFGFLVCMGVILAIGNAIWEHEVGMRFQVYLPWDEAVDSAFFSGFLSFWSYIIILNTVVPISLYVSVEVIRLGHSYFINWDKKMFCMKKRTPAEARTTTLNEELGQVEYIFSDKTGTLTQNIMVFNKCSINGHSYGDVFDVLGHKAELGERPEPVDFSFNPLADKKFLFWDPSLLEAVKIGDPHTHEFFRLLSLCHTVMSEEKNEGELYYKAQSPDEGALVTAARNFGFVFRSRTPKTITVHEMGTAITYQLLAILDFNNIRKRMSVIVRNPEGKIRLYCKGADTILLDRLHHSTQELLNTTMDHLNVGEYAGEGLRTLVLAYKDLDEEYYEEWAERRLQASLAQDSREDRLASIYEEVENNMMESLWYFQLLGATAIEDKLQQGVPETIALLTLANIKIWVLTGDKQETAVNIGYSCKMLTDDMTEVFIVTGHTVLEVREELRKAREKMMDSSRSVGNGFTYQDKLSSSKLTSVLEAVAGEYALVINGHSLAHALEADMELEFLETACACKAVICCRVTPLQKAQVVELVKKYKKAVTLAIGDGANDVSMIKTAHIGVGISGQEGIQAVLASDYSFSQFKFLQRLLLVHGRWSYLRMCKFLCYFFYKNFAFTMVHFWFGFFCGFSAQTVYDQYFITLYNIVYTSLPVLAMGVFDQDVPEQRSMEYPKLYEPGQLNLLFNKREFFICIAQGIYTSVLMFFIPYGVFADATRDDGTQLADYQSFAVTVATSLVIVVSVQIGLDTGYWTAINHFFIWGSLAVYFAILFAMHSNGLFDMFPNQFRFVGNAQNTLAQPTVWLTIVLTTVVCIMPVVAFRFLRLNLKPDLSDTVRYTQLVRKKQKAQHRCMRRVGRTGSRRSGYAFSHQEGFGELIMSGKNMRLSSLALSSFTTRSSSSWIESLRRKKSDSASSPSGGADKPLKG

SEQ ID NO: 40 - protein, 756 aa, Homo sapiens
MDNITRQNQFYDTQVIKQENESGYERRPLEMEQQQAYRPEMKTEMKQGAPTSFLPPEASQLKPDRQQFQSRKRPYEENRGRGYFEHREDRRGRSPQPPAEEDEDDFDDTLVAIDTYNCDLHFKVARDRSSGYPLTIEGFAYLWSGARASYGVRRGRVCFEMKINEEISVKHLPSTEPDPHVVRIGWSLDSCSTQLGEEPFSYGYGGTGKKSTNSRFENYGDKFAENDVIGCFADFECGNDVELSFTKNGKWMGIAFRIQKEALGGQALYPHVLVKNCAVEFNFGQRAEPYCSVLPGFTFIQHLPLSERIRGTVGPKSKAECEILMMVGLPAAGKTTWAIKHAASNPSKKYNILGTNAIMDKMRVMGLRRQRNYAGRWDVLIQQATQCLNRLIQIAARKKRNYILDQTNVYGSAQRRKMRPFEGFQRKAIVICPTDEDLKDRTIKRTDEEGKDVPDHAVLEMKANFTLPDVGDFLDEVLFIELQREEADKLVRQYNEEGRKAGPPPEKRFDNRGGGGFRGRGGGGGFQRYENRGPPGGNRGGFQNRGGGSGGGGNYRGGFNRSGGGGYSQNRWGNNNRDNNNSNNRGSYNRAPQQQPPPQQPPPPQPPPQQPPPPPSYSPARNPPGASTYNKNSNIPGSSANTSTPTVSSYSPPQPSYSQPPYNQGGYSQGYTAPPPPPPPPPAYNYGSYGGYNPAPYTPPPPPTAQTYPQPSYNQYQQYAQQWNQYYQNQGQWPPYYGNYDYGSYSGNTQGGTSTQ

SEQ ID NO: 41 - DNA, 201 bp, Homo sapiens
gaattgtcccagcagtgctatgccctaggtactaccaatatcactcctctatttcccagaggaggaagcagcagctagactccaggaccttggggtcatayctctcagaaagccaagagtgcaggatgagagctgtctgtctcttacctgcctgtatttgtgccccatttttaaagagcagagggcctgggccacaggaaa

SEQ ID NO: 42 - DNA, 201 bp, Homo sapiens
caagaaagactcgtgactgcccagcgccccaggctggactgagcccctcacgccgccctgcagcccccatgcccctgcccaacatgctgggggtccagaarccacctcggggtgactgagcggaaggccaggcagggccttcctcctcttcctcctccccttcctcgggaggctccccagaccctggcatgggatgggctg

SEQ ID NO: 43 - DNA, 201 bp, Homo sapiens; identical to SEQ ID NO: 42

SEQ ID NO: 44 - DNA, 201 bp, Homo sapiens; identical to SEQ ID NO: 42

SEQ ID NO: 45 - DNA, 201 bp, Homo sapiens
aagctctgctgcctgcgccaggagctggtggacgccttcgtggagcacaggtacctcctctttatgaagctggccgccttgcagctgatgcagcagaacgycagccagctggagaccccctcctccctggaaaatggtggtccttcctccttggagtccaagtctgaggatcctccaggacaggaggcgggaagtgaggag

SEQ ID NO: 46 - DNA, 201 bp, Homo sapiens; identical to SEQ ID NO: 45

SEQ ID NO: 47 - DNA, 201 bp, Homo sapiens
cagcttttcagcattggtatgttctcctacgtcatgctggccagcagccctctcttctgctcccctgagtggcctcggaagctggtgtcctactgcccccraaggttgcaacaactgttgcccctcaaggcagcccctcagcccagtgtttcctgtgtgtataagaggagccggggcaaaagtggccagaagccagggctg

SEQ ID NO: 48 - DNA, 201 bp, Homo sapiens
agcagctattcctgccctattctcattttctcacccagggctataacaactggacaaatgggctgtatggctattcctgggacatgatggtgcactcccgytcccaccagcacgtgaagatcacctaccgtgatggccgcactggcgaactgggctaccttaaccctggggtatttacacagagtcggcgatggaaggatc

SEQ ID NO: 49 - DNA, 201 bp, Homo sapiens
tgcctgcgaaataccttgatgaggatacaatctaccacctacagccaagtggcagatttgttattggtgggcctcagggtgatgctggtttgactggacgsaaaatcattgtggacacttatggcggttggggtgctcatggaggaggtgccttttcaggaaaggattataccaaggtcgaccgttcagctgcttatgctg

SEQ ID NO: 50 - DNA, 201 bp, Homo sapiens
acactctttatataacgaacgattaaaagtcatgtaagtgggagggtatttagtagtaatctacttaactacttgttttataccaacgtattatacaagtrtatgggtctttgcaatcactgattcttacgacatttgaatccttttaggtctcttatgctattggagtttctcatccattatctatctccattttccatt

SEQ ID NO: 51 - DNA, 201 bp, Homo sapiens
tgaatgaattcagaataggcaacctaatccacttggaaagcactaggcgtaaagtaacttaaatcctgtaatttcagggtgatgctggtttgactggacgsaaaatcattgtggacacttatggcggttggggtgctcatggaggaggtgccttttcaggaaaggattataccaaggtcgaccgttcagctgcttatgctg

SEQ ID NO: 52 - DNA, 201 bp, Homo sapiens; identical to SEQ ID NO: 49

SEQ ID NO: 53 - DNA, 201 bp, Homo sapiens; identical to SEQ ID NO: 49

SEQ ID NO: 54 - DNA, 201 bp, Homo sapiens
cttatctgcgtgattgtttttatcatcatcctcttcattgtgctctttgccactggtgccttctcttaagtaacagggaacctctcccacctgcccttctyttcagggacaaccctccataaatgtgtgccaagagggtctcctttcctgtcttcctctacagagaatgctgctcggtcctcctacccctcttcccgaggc

SEQ ID NO: 55 - DNA, 201 bp, Homo sapiens
accctccataaatgtgtgccaagagggtctcctttcctgtcttcctctacagagaatgctgctcggtcctcctacccctcttcccgaggccctgctgccaygttgtatgccccagaaggcaggaatagagttggagcggtgccagcagcaggcgaacgaggtgacggaaattatgcgtaacaacttcggcaaggtcctgga

SEQ ID NO: 56 - DNA, 201 bp, Homo sapiens
tcctggcccggggggaaaacttggaacatctccgcaacaagacagaggatctggaagccacatctgagcacttcaagacgacatcgcagaaggtggctcgraaattctggtggaagaacgtgaagatgattgtccttatctgcgtgattgtttttatcatcatcctcttcattgtgctctttgccactggtgccttctctt

SEQ ID NO: 57 - DNA, 201 bp, Homo sapiens
tgcggaacctgcaaagtgaggtggagggagttaagaatattatgacccagaatgtggagcggatcctggcccggggggaaaacttggaacatctccgcaayaagacagaggatctggaagccacatctgagcacttcaagacgacatcgcagaaggtggctcgaaaattctggtggaagaacgtgaagatgattgtcctta

SEQ ID NO: 58 - DNA, 201 bp, Homo sapiens; identical to SEQ ID NO: 54

SEQ ID NO: 59 - DNA, 201 bp, Homo sapiens
accctccataaatgtgtgccaagagggtctcctttcctgtcttcctctacagagaatgctgctcggtcctcctacccctcttcccgaggccctgctgccaygttgtatgccccagaaggtaccttggtcccccggaaggagagaaaaaagagagatggactgtggctgcatttcttgggtccttagagtgggctggagaga

SEQ ID NO: 60 - DNA, 201 bp, Homo sapiens; identical to SEQ ID NO: 56

SEQ ID NO: 61 - DNA, 201 bp, Homo sapiens; identical to SEQ ID NO: 57

SEQ ID NO: 62 - DNA, 184 bp, Homo sapiens
agacagagggagcagtgaatagcaatagggtgtttccaccatggtcttcactcaggccccggctgaaatcatgggccacctccrgatacgcagcctcctggcccggcagtgcctggcagagtttctgggtgtgtttgtactcatgctcctcacccaaggagctgtggcccaggctgtcaccagt

SEQ ID NO: 63 - DNA, 201 bp, Homo sapiens
gtgcatcgttggacgcctcccctgggtcaagctccccatttacatcttggtgcagttgctgtctgctttctgtgcttcgggagccacctatgttctctacyatgatgccctacagaactatacaggtgggaacctgacagtgactggccccaaggagacagcctccatttttgccacctatcctgccccctatctgtccct

SEQ ID NO: 64 - DNA, 172 bp, Homo sapiens
cagtgaatagcaatagggtgtttccaccatggtcttcactcaggccccggctgaaatcatgggccacctccrgatacgcagcctcctggcccggcagtgcctggcagagtttctgggtgtgtttgtactcatggggcccacctgaatccagccttctccctggccatgtgca

SEQ ID NO: 65 - DNA, 201 bp, Homo sapiens; identical to SEQ ID NO: 63

SEQ ID NO: 66 - DNA, 184 bp, Homo sapiens; identical to SEQ ID NO: 62

SEQ ID NO: 67 - DNA, 201 bp, Homo sapiens; identical to SEQ ID NO: 63

SEQ ID NO: 68 - DNA, 201 bp, Homo sapiens
ttgtcctcaccatcacagctgttaaagatgccactgatgactatttccgccacaagagcgataaccaggtgaataaccgccagtctcaggtgctgatcaayggaatcctccagcaggagcagtggatgaatgtctgtgttggtgatattatcaagctagaaaataaccagtttgtggcggctgtagactggaccttaagca

SEQ ID NO: 69 - DNA, 201 bp, Homo sapiens
ttgtcctcaccatcacagctgttaaagatgccactgatgactatttccgccacaagagcgataaccaggtgaataaccgccagtctcaggtgctgatcaayggaatcctccagcaggagcagtggatgaatgtctgtgttggtgatattatcaagctagaaaataaccagtttgtggcggcggatctcctcctcctttcca

SEQ ID NO: 70 - DNA, 201 bp, Homo sapiens; identical to SEQ ID NO: 68

SEQ ID NO: 71 - DNA, 201 bp, Homo sapiens
gtggtggctatagccagaaccgctggggtaacaacaaccgggataacaacaactccaacaacagaggcagctacaaccgggctccccagcaacagccgccrccacagcagcctccgccaccacagccaccaccccagcagccaccgccaccacccagctacagccctgctcggaaccccccaggggccagcacctacaata

SEQ ID NO: 72 - DNA, 35033 bp, Homo sapiens
catgacagtataaatatctacccagtgatgaccacatcaatggcagctcacagttgttgagtgttggctatgagccagggcctgggcttagacgagggcttttactcacgtggactcattcagtcctcacagcaaccctaagacatccatgccgttttcccttttcagggcttgattttacagaggagcaggctgaggctgggccatcccagtgcactgcccgcttcctgtcaaggtgtcttctgccctggaggccacctgtgtccccctacttgagtagtttcttgcactttgtcaattgctttatggacattctcttactcagtccttgccagcccagggagggaggcttttcaaccccgtattacagatgaggcaactataaggactggccaaggtatgttagtagccacaccaggacttgaccctagactctttgcacccaagcaggccacatcttcagaatacatttttttttttttggtccatttgtatatacccctttacagactgttttccccatctgtggcttctttcttgggtccctattagagccactaaaaaattgtttaaatgcagttaaaaactccttactccgtttctgctgagttcctgagtttccatagggagggtacctgtataggtgcctgggtcttacttctagaggttcaggctcaggaagtctcaaatgaagtttgagctgctcactttttaagtagtgtcctcgtgattcaagtatacaggctgagtctatggaaccctgaatccaacagaggtaggccccattcccaaagggcccgacatgaaggaggtgttcggtaaatggaagccgatgttgttactgctctcaaccacatatgtgctagagcaccgctctgccagcaccagcccaggacacacctgccatcacttagaggaagggaaggaaacattaggagcaaaactgcacttgcgaaaagcagagtctcctgatgtgtagagcttgctggttagaagcttgtgggtgaggctgatgtttcagagaaggactgagggaataaaagaaccaatgttaataagaacaaactacaaaactgtccaaaggagctggttaattagtagcatagctaatctataggtattacacagccattaaaaaagaatactgcacagaaaaacttcagagaaagtttcacgttacatgaaaaagcctcaggaggatgtgcataatacaattctttttgtgtaaaaaaatcacatagatatttctaaaagtgcacggaagaaattcattcttcattctctctgggaagtagggctggcactaagggaacacaggggtttttcctctaaactttatgccttatactgtgaatttttttaccaagagtatgtattagcttttagaatagggaaaagaaattgtaaggtccagtaccaagaacaaataggattaaaaagcaaagtcccaaccattaggaatcctttgccctgtgcctgtctgcagccacttacctaagtcaattcatttgctgagggtgactcaagaatcttctaagtaaagaagagctgtttcctgagtttctctgcttacaaggagcactgatatccttttctcagtccctggcctacataatacccctcagaggaaaaaaccaactcttaatgtaccatctcttgcctcttctgttaccttacccttagacaaatgtttatgggtcagcccagagacgaaaaatgagaccatttgaaggcttccagcgcaaagctattgtaatttgtcccactgacgaggacctaaaagaccgaacaataaagcgaaccgacgaggaagggaaggatgtcccagatcatgcggtcttagaaatgaaaggtaggaaatgagtgcttcccagaggaacgtcaatgcagggtcctggagagaagaagctctttactcagtttgtccttccctggctccccagtgatttcttttttgatcttactctttctttgcttctgctttgtcccttccttgtctaccacagctgtgaatggaaaagctacccatctgtcttatgttggggttttcaggctggatggggctggggcagcacaagggaaaggatgtatgggagctaaagctgaaagtcctgtgtgctcaccctgcctctggtcccagatgggctgactgtgggcaggcctcagtttgtttctctgtaaatatagggatggtgatgccatctgtctgacccattccctggggtgaggcctgagggagctgtgcactgtgtctaggtgggtcttagccacctcttcagaaaacggaggagtctttgttagcccctgacacttagcaggctgaggggttggggctttgtctacctctttctctctctctctgtttttttttttttttttttttggagagggagtcttgccctgtcacccaggctggagtatagtggtgcgatcttggctcaccgcaacctccgcctcctgagttcacccagttctcctgcctcagcctcccgagtagctgggactacaggtgtccaccaccatgcctggctaatttttgtatttttagtagagatggggttttgccatgttggccaggctggtcttgaactcctgacctcaggtgatccacccgcctcggcctcccaaagtgctgggattacaggcgtgagccaccgcgcccgcccttctgtctatgtctttcttattcactattccagttttcttcaccttctcccttctggaaggccactcttctgggtggaggggaccagacttcagaaggtactgacctcttcttcttgttctctttggggcacttccttcctcctagccaacttcacgttgccagatgttggggacttcctggatgaggttctgttcattgagctgcagcgggaggaagcggacaagctagtgaggcagtacaacgaggaaggccgcaaggctgggccaccccctgaaaagcgctttgacaaccgaggtggtggtggcttccggggccgcgggggtggtggtggcttccagcgctatgaaaaccgaggaccccctggaggcaaccgtggcggcttccagaaccgagggggaggcagcggtggaggaggcaactaccgaggaggtgagacatctcacacacagcactctccactttctgttcccaggttggggctgggctttgactgcttattcaatcagcaactgaagttttctgagctccagctgtgagttatactctggtagaaaacttgaaacaagtcagacacggagacctcagaaacgctcccactttcccactccctggacgctggttatgaagccctttgcccatttgcatatcacagtgcacattctgtcacattgctgtcatttttgtgaaccttcccccatctgaccatgagctccttggaaataggatctagatcaaaatctattggaaatgggggctacatctttggccaggtctgaagaggactagatgtgactcgttcatggctgtcaccagtgcttagcttcctctcatttttttttttttttttttttgagacggagttttgctcttgttgcccaggctagagtgcaatggtgtaatctcggctcactgcaacctctgcctcccggcattcaagcgattctctcgcctcagtctcctgagtagctgggattgtaggcaagcaccaccacgcccggctaattttgtatttttagtagagatggggtttctccatgttggtcaggctggtcttgaactcctgacctcacgtgatccacccgccttagcctcccagagtgctaggattacagatgtgagccaccgcaccctgccagcttcctctccttgagcatctccttcctgcatattcaacagctattgagatgctgggacacagaaacccaggactgccttggtctctgcctcaccattcttgcagtccagtgaatgagacaaacctgtcataagggctgggacaggggagtatgcccgggggtctagagaatcccagaggacatgctttgttgttcaccttgagttcttgctctgcgcctggccatgccggctcacagtagtcaccaagacaacccagttccctggggttgccatttgggaatgatggcgcctttcatctggatttctccaacacaggtttcaaccgcagcggaggtggtggctatagccagaaccgctggggtaacaacaaccgggataacaacaactccaacaacagaggcagctacaaccgggctccccagcaacagccgccaccacagcagcctccgccaccacagccaccaccccagcagccaccgccaccacccagctacagccctgctcggaaccccccaggggccagcacctacaataagaacagcaacatccctggctcaagcgccaataccagcacccccaccgtcagcagctacagccctccacaggtgagagaatgagtgtgtgtttgtatgtagtgatcgcacgtgtgcttttgaacctgagcaagttaggtggaggcggatctggggaaatcaacacatgccccagctactggtcttcactctaacctctagcctgcccttctttctccctggccgtgatcttgactcagatggaccctacacattcccagatcccctccaaacccaggagtaaatgtagaccttcccagaacctgctcttctcccaccaccctcaaggggatgggctgtaagcactgatccctccagcaagtacattattcttggctagtgtcactaacctcactaaatccccaagaaagcacttgactggagtcaccccttgcccaggctggctgacctctttgtcttttggacataataaccagggcactaaggttgctgaggacttgccctctgcacagagagcttcaatcctgagcagctccaggctcagttcccgttcttggaaagccagtgccctggctctggtatgcacaggctcctgtaaaccagagaggttttcagttatcgcacagccatttcccaagcactttcctcatgccgggcctggaatcagctgccaggaaaccaatggatggttcccaggcccagctaactagaatatttcttagaacaagagttgggcaggcacagatccaaacccccagccccacaacatcctgtttctgtgagcttggacaaatagcttcccgtctctgggcctcattttcctcataaaggtgttagtagaagtcccttccaaggtttgttgtgaggaatgggtggcactatagctctgggactaggcagacctggggtcaagtcctttttccttggcccagaaatttcatcttgagcctcagtttctttctctttaaaatggggctagtgggacctacccctaggttctatatggagattaaatgatgtaatgatccaacctgtacttgggaagcacttagtcaattgccactactgtttctcagcagatcttccagtaacaactaccaccacctgttgagtacccagtggtttatacacacaagcttattggatacccagggcaagctaaaggagttgttcttgttctattgtgattctcattttataaaaaagaaaactgagatttcaagaagtgccgtgtaccttgctccctgggggtctcagagctggggttagagtccacatcacagccctggggcttgcccttcatcctgccctaccatggcatggagctggctctcctccttctcagcccacaaacaatgtccactaggcaagggaagggcccctgtgggccaaccacttaaaaaggccctttttccatcccagcatttcacatctgcagatttcctctatttcacagagctttggcttttttccctccactttccagccgagttacagccagccaccctacaaccagggaggttacagccagggctacacagccccaccgcctccacctccaccaccacctgcctacaactatgggagctacggcggttacaacccggccccctataccccaccgccaccccccaccgcacagacctaccctcagcccagctataaccagtatcagcaggtaggtgccagactgggggccaactggatggagagacttccatgggcccctcctgggtgtgtattcccagacttaagtccctgcttatccctaaaaagacagcctgctggcctcggcctggcgttcatctggtgcagccattccatttggtcaacacttctgcactggttgctaggtaattggtatcctagccccctccacagtctagcaagtgaaggggaagggctggcctaagtaccaggggcctcagagtcctctttcagcaccatagacagggggctccaaatcctgctgcaggttggtgcccaggcccccatacctgttactaaatcttttgactatgatatctagctatacccaaaaggcactgggttgacaagctgagacctgggcttcagtccctaactgcctacctgtgtggtgtcaggtctttccaaggtgccttgatttctctgtcaggggacctgtgttcaactgttgtcactgcagctgtctctgccctaggtgagggtggggctggtggggaggctaaatgtgtggtggatgcaggacaacttggtgttcttggtttctttccccagtatgcccagcagtggaaccagtactatcagaaccagggccagtggccgccatactacgggaactacgactacgggagctactccgggaacacacagggtggcacaagtacacagtagccagtgtgacccagaggctcccggaggcccctgccggcttcctccaccagcgcctgcctcggcccctcctctgcccccgccagatcccgtggtgctggggatggggtcatcccagggctgcctccctccagcccactgcctcccctctgaggggcttccttcccctccatagggccaggcatttttttctggattcaaacaggcaacaatgaccttttattttctgtttgtccccacctccccagccttccacctcctgttcttcctaccttcttcctttttgactaaataatccccacctcccttgatcatacagtgaggctacagtgactgaggggagaatcccctcctgttcactctcccaaccctgctccagcccctcagcttcccagaccctcatgcagttggttgtaaattctcccaggagctgttttactgtctacttttcaggattaaaaaaaaaatcaaaacttaaaaaaaaaaaagtttaaaaagcaaaatggggagggggaggaagcagtgacttttttttggtaattatgcgcttttttttaatttttagaatttgtctttttactgtgggtgggctgttgatatttcatcaagataagcatttctttcctgagttcaggtgactgaggaagagccacaaaacaaaacacaacaaaaccaaaccacagaatcatctttaacccaactttttatacgatgccccagttccccataactttgcacacaagcttctgtgttcagttgaattgtaactgctttttgtatttggagagagtgactattgaacttgaaaccttttattccgggcgtcttggtagtttctggtgggattcagtgggtgagagggaagaaggggaggttggggggctccttcccttcagaacttgaagtttctcccactgcctcctctccagtggtctcccaggtgccagacccaaaagcttttcctacagtgataccctttatttttacttccccttgactcatatgttttaacatgattttaacaaactgcacttattaagaaatgtgtttgccctgttttgtttggtttcgttttgttttctttgaataaatgacatggcacctcctagcaggaaggaagcagggttgaaaccctgaagtgttactgcagttggccgttaattggggtgggggcctctttaaagggaaattatttactcattcattaaacaacttaactgagggattcatgtgcctggccccgattttggtgctaaaaatgcacgcttaaacaagggtccctggtttaaaatccactagttcatttttaaagtgcttctcttgttctctacctctcacagtctaaaatccctccaggagtttttgagtaaaggacatggaacaggcctctaggtggagggatgggtgggactgatggggcagagaccagggctggtttgtttggcatcatcactgggcatccacagaccacctgcctcaggcctggcctgtgtgcagcacggaggacagttcctgcctgttctgtgtttggggctcatggggattccaggagcttcatgtttcagccagtgtgtgtgagccacctgctgtgttcttcagctgtcctggacagtgctggggacatagtatggccacggcagtcctggaccccgttctcacagagctcccactccagagagaacaaagacctgccagcaccaagtggtcagctgtgagagcctggggtggtgtgcagggagggcttcctggaggagtgagccagggtaaaagactccagattgcatccccatggcccatcttccccttccttagcaaccttatgtcttcgttccctcatacatgctgtgttcctggctccttgtgagagacaatgctgggccacaggagaagccaattcagccccaatcttccctggtgggagctcagagccttgtgaaggggagatgggcaacaaaaacaagggagggaaactgactagtctcagaatctcgggtagggcatcagaacgtgagaaggaaccaaggttggtggctaaaagggaccctagaatgcgccagagaggaggtggcagggcctttagtctggaaagtccccttcccttcatgtccatatgctgggctacagcgccctctgctggcctctcctggtaatgcctaggaatctgggttggtaaatagggacctccttggctttcttccacaactccagacctcaagggaatgcaaatggggaagctcttcctctgttctcagccagtttttctcacacgtctcatctccagtcccttgatgcccactcccttcagaataaaggaggtcaagccacttactatggcttatgaggccctgcatggcctagcacctggtaacatcgctggcgccctctctttctgctccccctttgaatatcaaatcagtgtttattttgttctgaggagccataagtcctttttggaacccacaaatgatgccatgaaccactgcattggagaatacagaggtacatggaattttgcataaaaattcatgaggttctcaaaacctccacagcccaatcatggctttcaagttagagctcctttcctatgccctgaccgtagtgaagtgcttgcagcaaccagaaccgtccgtacgtgccatcctcctcaagactcttccctaccttcctcttaacccagctcctactcgttcttcaggtcttagcttgagggtaccctcccagaaagaaggcttccttgaccctccagcctggggtggacagctccctcagccctctggatccatcaaagccctggccactgagtgacatgtctgtctactctgctggtaacacctaaatagagccccacccatcccatagggaaataaggaccagagttgtcttgtttcacacctgtagatttcctccaggtcctgggaacacaaaatgggaagttctatctcactatccatctcatgccagccagagacagggtatgatgacggaagtaagccaggctggtggctcacgcgcgtaatcccagcattttgagaggctgaagcgggaggattgcttgaggccaggagttggggactagcctgggcaacaaagtgggacccctggctctacaaaaaaattttaaaaattagccgggcgcggttgtgcgcgcctgtagtcccaagtactccaaaggctgaggcaggaggatcacttgagcacaggaatgtgaggttacttgaactgtgatcgcgccactgcattcgtctgggcgacaaagcgagaccctgtctcaaaaaaaaaaaaaaaaaaaaaaagagtcaaggcttagtaatattcctgaattcctgaaggagttaagaaaggaaaaggacaagcgggggtctaaacgagagcacgaaccctcagcgtatgacggctccaggctccgggggaaagtcctttagccatccatcccaaaattaagcacgctgggagctggagtcacagcagtgataaaacgaacaatgattctggttcctactgactgacaggagaggtttaagggtctctcactctccggggagcccctttccttcctggctgcggagggcggagcccgagagaggcacgcatgcgcaatgcaacgtctgccttaggcccggaacttcggtgcctgggcgcagcggtgcacccggacccggaacattctcaggcgaaagtgtctcttgcgtgcgtgggccggaggttagtgtgcggggcccgccgggcggttgaaaagtccgagagaatcaggatggaggccgtggcgacggcgacggcggcgaaggaacccgataagggtgagatcttggtcacgcgcaggcggcgggtgggtgcggttgcggtgtctctaggaaatgattcccccaggaacgcgaagtaggactcgttttagggggacacccacccccctcagctttaccggtcctcttcactactttgcccagattattccctcccttgtcgcgggctgaccttcttttcctccattccttccccccgaaattaacctcttcccagttccagaccaatcctttccatgtccctaattcatttccttaccaggctaactctcaaattaacagaaacctctctaccccggcctaattcctgcattgcctcagaccagcccttctcaaattacctccttccctgtaccaagctgagccttcccttgctctctagacgaatcctcctacctttccaggctaaacttctacctgcctcatgcaaacttatcccaatctaacgattccttcatttcattgtaactcccgtttcccccaaagtccgaaatccagccaggctcctttcaaagtccttactcaatttctgtgctttcccacaaccttcaaagtaatccgacgtcgggtgaggtgtgattggaagcgtggctccaacaccactggccaagaattggtaattgtggaagccagatggagatgattggtatatggaggtagggggagaattgtcgttgtactttctacttttgtgtatgtttgaaattttctaaaaataaaaaatttaacctaaaaaaagtcttaaggccgggtgcagtggctcccgcttgtaatcccaacactttgggaggccaaggcaggagagttgcttgagcccaagagtttgagaccagcctgggcaagagagagaaacctgatctctataaacatttaaaaattagccaggcctggtggctagggagtagctaggacaagctactcaggagactaaggtgggagtgtcactcgaatcctttgagattgcagtgacctaagattattacaccactgcactccagcctctgcagcagagtgagacttgagcccaggagtttgagaccagcactggcaacatagccagaccccatctctacaaaaaatttaaaaattaaggccgggcccggtggcttacacctgtaatcgcagcactttggaaggcggaggcaggaagatcacctcaggtcaggagttggagaccagcctagccaacatagcgaaaccccatctctactaaaaatacaaatattagccaggcgtcgtggtatgtgcctgtaatcccagctactcgggaggctgaggcaccaactggaatcacttgaacccgggaggcggaggttgcagtgagcagagatcgcaccactgtactccagtctgggtaacagagcaaaactctgtctcaaaaaaaaaaaaattagccaggtttgatggtgcattcctgtggtcccggctactcaggagtctgaggcgggaggatcacttgagcccaggaggtcaaagctgcagtgagctgtgtttgcactattgcattgcagtctgagcaacagagcaagaccctgtttcaaaaaaaagaaaaaaaatttgtctcttggccccatctgtctccttcagagagtcatgtatacttggtcttcatttcctcgtctcctgctcacgactgtctgacttttctcctaagaaactgctctgattagggtctgcactgacttcccccatgttgttcaattcagtccccccattcaggtttttgtttgtttgtttgttttttgagagagtctcactctgttgcccaggctggagtgcagtggcatgatctcagctcactgcaacctccacctcccaggttcaagtgattcccgtgcctcagcctcccaagtagctgggatcacaggtgcccgccactatgcctgtctaattttgtatatttttagtagagatggggtttcaccatgttggccaggctggcctcgaacttctgacctcaagagatcctcctgcctcagcctcccatagtgctgggattacaggtgtgagccaccacacttggcccattcaggttttttttcttactagactggactagaattaaatgctgttgatccttccatcctttttgcatgttttcctttggcttcagcgacaccacagtgcctgatttcctgcctgtctctcaggctgctccttctcagcctgactttgtttcccaggggtgctgtaacaaagtactacaaactgcatggcttcaaacaacagaactttattctctcatagttctcaaggccagaaggctgaagtcagtgttgctgaactgaaatccaggtgtctgcagggtcgtgcttccccacaggctctgggagaaaacccatttcttgcctcttccagccagtggtggtttctggaattccttggcatgtggctacatcactccaatctctgcttccccttttgacgttgccttctttttttttaagacggagtctcgctctgttgaccaggctggagtacgtgatctcggttcactgcaacctctgcctccggagttcaaacaattctcctacctcagcctcctgagtacctgggactacaggagtgcgccaccacacctggctaattttttgtatttttggtagagcgccatgttggccaagctggtcttgagctcctgacctgaagtgattctctcaccttggcctcccaaagtgctgggattacaggggtgagccattgcaaccggcctctttttttttaagataacagtaatgggctccagggattacgatgtagctatcttttgcacagccagtttttagcttcagaggcatgtcctccccgcatctgtgcagtgctttttcctggaccctcttgtcatccctctcccactcccctgtgccctccccagtccctacctctcatttctcttggctttggttcttgtcttgattctgatgacacccacagctctgtctccagcccaacatttctctcctgaggagtctggaggcccgtgtagcagcagtcggaccattcccctggatgcctcccttacttccagcacgtcagccctgtggctcctccactcagcctcctgacatctttctgattcgctcactcatgatcctgttccttcctccacagcccctgcccttgtccagctcagtcttcagctgcatcagtgatttaaatcctccctgatacacacaacacatgtatgtcacctgtgacttctttcctccccaacccagccacgctgcttaaagttgtctctatattctgttttcacgtatttcctgcttgccgcaggcttgctccctccactcttgggaaacaagtctcaccaaggtttgcccagcgctccgctttcctgttttctttccatttttttgagacagagtcttcactctgtcacccaggctggagtgcaatggctgatctcggctcactgcaacctctgcctcatgggttcaagcgattcttgtgcctctgcttcctgagtagcagggattacaggtgcccaccaccatgcccagctgatttttgtatttttaatagagagagggtttcaccatgttggccaggctggtcttgaatttgtggcctcaagtgatctgcccacctcggcctcccaaagtgctggattacaggcatgagccatggtgcccagccagctttcctgttttctttgcccatattattgttgatcctgactgtctcccacatcagactgggtgctccctgagggcaggagctggactggattcatcctatggatcctcagcattgcctgacttagggcctctcagagatttagtgtttttttttctttttttttttttagagttttgctcttgttgcccagactggagtgcaatggcacgatcttggctcaccgcaacctctgcctcccaggttcaagctattctcctgcctcagcctcccgagtagctgggattacaggcatgtgccacaatggctgattttgtatttttagtagagacggggtttctcccagttggtcaggctggtcttgaaatcccgacctcaggtgatccacctgccacagcctcccaaagtgctgggattacaggcgcaagccaccgcgcccggcctaagatttagagttattaaagagtggttgggtgaacgcatgaatgcatgagagagtgaatgaatgagtaaacaaattagcaaatgtattaacgatttaaagaattgagtggatcaataagtcaggcctcagggcctttgcagtagttgttgcctctgcctggaattctcttttccaagagacctcatggcttaatccctcaccacctgaggtctctaatcaaatgtcacttttttggcaaagccttctctgagccttccatttaaaattgcagccttggccaggcatggtggtttacactgtaatctcagcactttggaagcctgaggcaggaggatcacttgaggccaggagttcaagaccagcctgggcaacacagcaagaccctgtctctaccaaaaaaaattaaaattaggccgggtccagtggtgcacgcctgtaattccagcactttggaagatcgaggtgggaggattgcctgagctcaagagattgagaccaccctgggcaacctagtgagaccttgtctttactgaaacttttttttttttttttaatttaaagattggcagggtgcaggccaggcgcagtggctcacgcctgtaatcccagcactttgggaggccgaggcgggtggatcacgaggtcaggagttcgagaccagcacagccaagatggtgaaaccctgtctgtactaaaaatacaaaaattagccgggcatggtggcaggtacctgtaatcccagctgctcgggaggctgaggcagagaattgcttgaacctgaggcggaggttgcagtgaatcaagattgctccactgcactccagcctgggcgaaagagcgagactccgtctcaaaaaaaaaaaaaaaaaaaaaaagattggcagggtgcagtggcacacacctgtaatcccagcactttgggaggccgaaggggagtggatcacctgaggtcaggagttggagaccagcctagccaacatagcgaaaccctgtctctactaaaaatacaaaaattaaccaggcatttggcttgtacctgtaatcccagctagttgggaggctgaggcaccaaccacaataacttgaacccaggaggcggcagttgcagtgggcagatctcacgccattgcactccagcctgggcaacaagagcaaaactccatctcaaaaaaaaaaaagaaaaaaaaatttaaagattaactgagtatggttgtgcatgcctgtagtcctggctgctcaggaggctgaggtgggaggattgcttgagcccaggagttcagggttacagtgaaccatggttgtgccattgcactccagcctggcaatggagcaaggccttatctcttaaaaaataaaaataaaaataggccagtcacagtggcttacacctttaatgcccagcactttgggaggccaaggcaggaggattgctggagccctggagttcgagaccagcctgagtaacatgtcaataccctgtctctacaaaaaatttaaaaattacacaggcatggtggtatatgcctgtggtcctagctacacgggaggctgagatgggaggatcgctcaagcccaggcggtcaaggctgcagtgagctgtgattgcgccctgcactccagcctgggtgaccgagcaagaccctgtctcgaaaataaaataaaattgcagcctcctccacctcttccctcctccttccctgtttatttttccgcataactccaggaaacacctaacacattatgttttcggtaattatgttgctaattgtttgtgtcccctactgaaatgtcaacttttgctcactgtggtttctctagtgcccagaacagtgcccagaatatagtcagtgcccagtaaatgtgagctgagtgagtgactaagcccccagtcccttcccacactcccatctctgaactaaccaatctctcctttcctcaggctgcatagagcctggacctgggcactggggtgagctgagccggacaccagtcccatctaaaccccaggacaaagtggaagcagctgaggcaacaccagtggccctggacagtgacacctccggggctgaaaatgcagcagtgagtgctatgctgcacgctgtagccgccagccgcctgcctgtttgcagccagcagcagggtgaacccgacttgacagagcatgagaaagtggccatcctggcccagctgtaccacgagaagccactggtgttcctggagcgcttccgcacaggcctccgtgaggagcatctggcctgctttggccacgtgcgtggcgaccaccgtgcagacttctactgtgctgaggtggcccggcagggcactgcccggccccgcaccctgcgtacccgcctgcgtaaccggcgctatgctgccctgcgagagctgatccaaggtgtgggggccagatgggcgacagtgggcacatatggggagggaggggagactgaggcagagggaattagagaaaagaatacaagagcagagacagagatcctgggagagaagttctgagacagagacagggacacaggaagagactgagacagaaatgtaaagtaagggggagagatagacaggggtccagggaagagaatgggacagacaatgagaatagatcagaatttagtagatgtcagaagtggcatttcagattggtaggctgaggacacagtacacagtgctgtgataattggtcatacctaaggaacaaaacatgagatccctacctcataccatatacagaggcatcaggggaaaccaaaaggagtatgtacatgaccttggggacacagaagccttctgaacaagacacactgtgaaaaccatgaaggaaaaaaaagatagctttttgaccatgacataattaaaagcatccttgtgaccacaacaccagaaccaaagttaaaagatgagagtgaatgaagcagagtgagttaagttgccgttagggagaaggcacaagttatagagaggttcacagagaaagagagagaggctgggcatgatggcttatgcctgtaatcccagcactttgggaggtcaaggtgggtagattacttgagctcatgagttcaagaccagcctgggcaacatggcgaaatgctgtctctacaaaaaatacaaaaattagctgggtgtggtggcaccctagctactcagaaggctgaggtgggagaattgcttgagcctgggaggtggaagttgtgtgagctgagatcccaccactaagctctagcctgggcgataaagccagatcttgtctcaaaaaaaaaaaaaaaaaacacagatgtggaaatgaggatgaaaacagaaggaagatgggccgggcacagtcactcaagccggtgatcccagcactttgggagggcgaggtgggggtggacctgaggtcaggagttccagagcagcctggccaacatggtgaaaccccatctctactaaaaatacaaaaaaattagccacatgtggtggcaggcaactgtaatctcagttacttgggaggctgagggaggagaattacatgaatctgggaggtggaggttgccaaaaaaaaaaaaaaaagaagaaagatgaatgaggtgggggtaggtgacagaaactgaaaaaagcaggaaagatagaaagatggagataaaggaagagatggagagagatccagagccggggtgggtgataatccaagttggggagaaggagggatagaaactgaatctgctagaggctgggcacagtggctcagacctgtaatcccagcactttgggaggccgaggcaggcaaatcacttgagataaggagttcaagaccagcctggccaacatggtgaaaccccggctctactaaaaatacaaaaaaaattagccaggcactgtggcaggtgcctataatcccagctactcaggaggctgaggcaggagaatcacttgaacccgggaggcggaggttgcagttagagttaatcgagatcacaccactacactccagcctgggcaacagagcgagactccatctcaaaaaactgagtctgctagaggatgccacaaacagctgggggtaagattgctggcaggagtggggaagctgagcaggacagggacagtcacagcctatggtgctgcagaggccaggagtccgagcagtttctttgccctggactctgaagacacggctaggaccagtggaggggagggaccagggcaggtttaactgttatttgagggacagagtcactcgtgcagaaacaggcagccaggggtgatgcagggaactcaagttttggggtagtggggaagccaggcccacctgaggggttgctgcatagaggagcactcgagagaggatggatctagggccttccaccaccaggaggctttcccagggatacacgggcagatgccccacctgacctgatcccttgcacacacatgccaaatccacgtggatgtacacacatacacgccccacagtgaaggcgtgtccactgccagccagactagggccccacaaacaggcacacaacctagagacacacaacttctgctgcattgtcctgcatgctgacacccagacagacaggtgtctgtgggcatatgctgggcctcacaggacatgtgtgtgtacataggccatgtacacgtccatgggcaggagcttgtgcatcgtgcctggacacagttgtacacgagctccagaccgtcagagcctcagaggccaggatgtagccaggtctgcccatgcacacacatgcttggatgcatgaatacatgaatacacaggaagatagaggctgggccacatacacacactcgggtgcctgcacgagtaatcacatgcacgtgacctcaggtgcctgcatgagtgcttgcgcacacagcttcaggcacctgcatgagtattcacgtgcatgcctcaggcgcctgcattattcacacgcacgcctcaggcgcctgcatgagtactcacgcgcacctcaggtgcctgcatgttttcctgtgtttttgaatgtgtgcatacacacacttggactgtgtatgcacatcatcccacaagcatgatcacacacatacccacatggacactatctgctcagtcgctcaccccatgcccaccctgtctctcctctgtgcagggggcgagtacttcagtgatgagcagatgcggttccgggcccccctgctatatgagcagtacatcgggcagtatctcacccaggaggagctcagtgcccgcaccccaacccaccagccccccaagcccgggtcccccgggagacctgcttgcccgctctccaacttgctgctccagtcctacgaggagcgggagctacagcagcgtctgctccaacagcaggaggaggaggaggcctgcttggaggaagaggaagaggaggaggacagtgacgaggaaggtgagggccagtagcaggaagaccccagattccagacaccccagccctaggcctgtctgtctccacttcatggcagcaggctgggcccccaacctgcaaaagccgacattgcgtccctcccctgcccagcctgactctctgtgtatgcccttccaaccgctgcagcatccccatcccccactctgaggcaccaaatgaaccctcgcctccaggtctggacaggctgttccctccgccaggaatgcctctcctcccacccttcaggtctcagatcctgacccgaggatacagtctccagagcactatatggtcatgtgttttatgcgtgtccctggagggcagggaccagggccatctctgtcactagtgtgttcccagagccacccagcgcaaggctgggcacaggagcagcagctctctgtggactctgtgctcagtgcctgcccgagtgcacccgcattcacaccccctctcctctccctctgcagaccagaggtcaggcaaggactcggaggcctgggttcccgactcggaggagaggctgatcctgcgagaggagttcaccagccgcatgcaccagcgcttcctagatggcaaggacggggactttgactacaggtgctcctgtgcctccacctccccatcccccagcccagcatcccacggcctttggtcacatgcagagcccttaacaagctgtgggggtctccctttgtggagctacaaggccccaaaacagttccaggatgtggggttgaacagccaaaggaagaggctgggtgacctcggactagccttgtccatctcagaccctcagtctcctcacctctaaggcagggggtggacagggatgacatatagctcagtatcaatgaaaccctgaaacacttccctcctggcaatggcagaggctactaccccaagccccccaagtctccctaggaagcccaacctcttccgcttcaccttggacctcctcatgctgcaggaagtaacccctggcaaagttcatgcccggcatggaggggcctgcactggctgcccccacagttacagttgttcatttctccagtagcaccccagggctgagacacgtgggccacctgctttggaaaaggacccaggagagtgatgtgtcagtcaaagattggttttgtcatttaaggtagctttgccttgtggtcccaaacactgggcccagcagcagaggaccctccttggtttcacatccagccccgatgacatgtgaaatgtgtgaccacacataagcggaccctacgtccgtcctgaggtgggctcatcaggaaagtgggaattgtgattgcccctgccgtggggcccagccatggtcaccagagcctcttcccattctgggatccctggctcttgaatggaatctggctgctccacttccagccaggcaggcctgctcagagccccagttcctgcacgcaaagtggtgagcagagggcctggaccatggggaccctcattcagcaggcatcactgctgttcccaagccagggcccaggaggaaattgggggtggcagggaccacagtgtgttgcctcgggagggcagcagtggccccgacgtgtcccccatccgtgcattcagttggcatgtgctgagcatctgtgatgtccacaggctctggggataaggcggggaccaaaaccaacgaaaggcttccctgcctgaaaaggggtcccactctagtgaggaagatctagaattttctagcacttcatggtgatggggccatgaggaaaagtgaagcagtgggaggggagtgacagggtggctagggaaggcctctctgaggggctgacagcaaaggcctgcaggaagtgggaggagcattcctggcagaggccatagtaggtgccagagcccccagcagcaccaaggggcagaaggggctggagcagtcgcaaggggtcgcaagggggtaggagatctctgagtggccaaatcaagctaggcttggcaacccaagtgcgtgctgctgggtttacttgctgccttagggcatgggcagctgtcctgcctgtggtcagctctggctaatcccggcctctatccactggagggcagtagcaagcccccagtgatgacgtcaaaatgtcaaaatgccgtgggggcaaaattacccccaagtggttctttgttgagagccactgcctgcttgagaatgtaagcccatgtgtcgccacattttacagctttttaagaaaaactagagctttggggttttttttagacagggtctcctttgtcacccaggctggaatgtggtggtttgatcatagctcaccgcagccttgacctcctggcctgaagtgagcctcccgcctcagccaactgagtaagctgggactacaggtgctcaccaccacgcctggctactttttcaatttttttgtagagacagggtctccctttgttgcccagggctccaactgctgggctcaagccatcttcctgccttggcctcccatagtgctgggattgcaggcatgagccaccatgcccagcccagagtttttgtgcaaactctgatttggaaaatgttcccttgagttttaaaccctgagagttttaaacactatctcccttgggagggtcagctctgacggctgccagcacatggcctttgacatcagggtgccccaggcctttgacctgggcatccgagggtcccagggagacccagtccttgacagcctcctcctcctgcagcacagtagacgacaaccccgacttcgacaacctcgacatcgtggcacgggatgaggaggagaggtactttgatgaggaagaacctgaggatgcgcccagcccagagctggatggggactgatggccgccacccttcccaccgcctgccccatccccatccccaacaaggcagctgattccaggcctgctcagtgaccctttctctagggggacatcagggcagtgccccacaacccacacacaccaccatctcactgggtctagtctcatctcagacaacccccacccccactgtttctggggttccctttctcatctctcccaccctgtctcctgcctctgtctttcttggtgtctgtctgggcttctttctgtctctttctgtctttctgtctctctccctacccccgctccctctttccagtgctctggctggctgtctctccctttctccccctctctctctgccttaggctctgtctccaccgcagggcccaaggtgaaagtcctccccttgccggaggccagctggcagggcctttcgtggctggaagtggccagtttggttccggtgctgacccctaggccccagcgcagctgcctcccgtgctgtctgtctccccctctctgtttatgtctgcgctgtgtctcacactcagagcctccttgcttctgttaggttcccatctctccttctgcctcactctgggcctcttctttctacttgtacatttccacctctctaggcctctgctctcactgtccctctctgtctgtctctcagcctttatctctgggttttgatccccgactccaggctctgggccccttcttcccccttccctcaaacctggctgctataggcagcagaaccctgaccactgagtaatacagccccaggggagggaggagaccccaggcagggaggatgggggcagctctcttctctccccaggacccaggctgtggatcacggggcctgccagcttgagtgtagagggaggggggactctacccttctcagccccaccagcccccctctgcccaaccacaattttcccttcctccgccttcctctcccactcctgtttacactccccaaatgcgcacaggctgttatcatgggtcctgagtcatcccacacacagcctgccccagcgtccctgcccccagctggccgcagggcccgccccatggagccccctgccgccctgggctaatgggagccagatggccgcctggtgactcagccaccgggcctgtgggaacccaggcgtcccgccttcccatgcccccacacccggctcctgctcccccagcagacacacacaggagggcctggccactgttgagggggcacacagggcaagggtcaccaagtcggggcctagggactcctcatgcctctgagatggaatggtggtatcctgccgtggccaagcctgaaggaccctcaaaactgcctcctggagtccacggttcctgacctccgagcctcagctatgccctctgggtcaaccagaattagagccagacagggaaagtgagagctggatggaggcagacaagatgctcagagcgactattaaagaacgaaagcctctgctacggagcgcttctgtcctctgtcaggcccgagcgaagtgcctgacaccgggttggatcctcagatggccccatgaactagtgaagtgggtcaaaggaggcctggaaagatgttgcttcctcaaggccactcggccatcagaggcagaaatgaaacaggaacccaggcctagaatcacaaaggtcctagaaaccacttggctgtctggcctctcaggtgtcagggccatccagagtgagacagcattggagggacaagtgtgcatgcagatgtcctcagacgggaaggtttgagaagggtcagatggtaggcgggcctaacaagggctccgtgctagccactgtcccgcacacagacaggatcaggtcatcttgatatggagatcagtccccaaatcactgaattgtcccagcagtgctatgccctaggtactaccaatatcactcctctatttcccagaggaggaagcagcagctagactccaggaccttggggtcatatctctcagaaagccaagagtgcaggatgagagctgtctgtctcttacctgcctgtatttgtgccccatttttaaagagcagagggcctgggccacaggaaaggtatcagcccttggtgataggcacattttttaccagtctatcatttggtcattaaatttgtttacaatatactttgctatacgtaaatttgttgtgtaggtttttaaaaagcgatgagagacacagaaattgagtcagaattagggttagtcagatggtcaagacgtgagcatctagctgacagacagaggtggagccagtcccagggacagggattagatggggagacaggaagagaggtggagacagagtggggtagggatgacgggagacacaccccctggtcactgcctctgagacctgggggtggtgggccccagggcgggtgcctcccatccccctcccagttctcccggggtcggggtaggtggaaaggctgagtcagggagggcgggccccgctgggagacaacccctaggtgggcatccggcccccacccccgtgtctcctgtccgtcctggccctggcctggctcgctggcctggccgacaccccgccccccacgtctgacacctccatgcgtcctgccaaagcaagctgcctccctgcactcttccccctccagctccagtcactctgtccctctgtcccccgtcccttctccctgcttctgtgcgtttctttccagccctctgccttcctccctcaccgccactgctctgtcttctcgttctgtctccacacctctggctgtcggtgtctccccgtgactttccgtctcccctctctctcctcccttgtttttcccatgcctctccctccctccctccctccctctcctccccaccttttccactccgtgtccccagccattctccatctctgttctcagctcctgtcacctcgtttccccatccctttctctgctggagtctccctctggggggctctgtcctctcctcactttgccctttccctctcgctgctgtgtgtcttggcccgccccccgtgccccccatctcctctgtctcccacactctgggaagcccggctgggatatccaggttggagcctcactggcggccactggaaacccagaatgaggggtcatcgcctctcgcccacccagaaagggcgcaggagggggcagcaaggttgcggggcctgtctggccagaaggaaatgtctgtgctgtggcctggtcacccccgcccccaggacctgctgggctgctgccgcccccggccggggctgaggccgagtaaacacagcaaacacagccgccggcagcctgggatatttataccgaggctgggcgtgggtccagtgcccaccacagcccctgccctgccctgccttgcctgctgccacagccagctccgagccagcgtggcaccagccggcaaggggacgcgccgcagacacagcctgcgctgggtatggaggccaacaggcactggccgctcatgatgcaggcggcttcatggacgcaccctgtccccctcccctgaaaacaccagcacacaatgtggacccacactcgcagctgctcacaaacacacatccacccctgctgagaacgcaaaatcccctcaacgatgatgcaaaacagacccacacaactccacacactgcagtcaccagcctacatgtgggaacacagcatgcagacaccaccttagcacctgctcacagcacccacaggctgggaacaccagtccctgagatggacacacagccccgaagtacagccctccctcacacagacaaacactgagaaccacaggaagcatgctggatgcacaccacgtagacaaacatgctcagaataccagcgacacatgcactgatcacagtgcaacccagaaacaactcaactcatctgcctcatatgtaagaaacacacacggccgggcgcggtggctcatgcctgtgtctcagcactttgggagaccaaggtgggtggattacaaggtcaggagttcgagaccagcctggccaacatggtgaaatcccatctctactaaaaatacaaaaattagacgggtgtggtggtgggtgcctgtaatcccatctactcgggaggctgaggcaggagaatcgcttgagcctgggaggcggagcttgcagtgagacaagatcgcgccattgcactccagcccaggcgacagagcaagaccccgtcttacacatatacacacacactcactcccctctcctggagaaacaccattcccacagatgattaacatatgcagaaaacaccacatttcaagtcaaacttacacttaaaaatgcacaaatttacactcagaagaacagtgaagatgttgagaaaaatatcagacacacaatatgccccagatacatggccgacttgcagaatcaaacagtgccagagcataaaacccacagaaaatacaacagcttgcccagcagaaatacaaaatgcagacgcacaccccagaaatgcagcgcagccacaaacacacggagctaacacgtgctggggacacacacagacaagaccatccataccaaacagcacacaggcccccagaacacccatgccagacgcagctcacgccacaaagcttggaatcacgcacacaataagttcctgaacacacaaatccgaatccacactggaacctcaaatactctgcatgtccagagactaagggggaaggggctttctctcacccaccaatctccccactcccccttgctgacccgggtcccaggcccgtcttgggggcgggggagggggcaggaaggcctgagctggcctcccccagcagcttcctgccccacgggggctggacaggaagctggggctccagccggaacccaggctccccccacgacttccctctgtggccccgggccgcctgcagaggcaggggcggggcagggggaggaagcggggagccccaaaccccctgccctgcccctgcggtcggccacaggcgggggcagacttgtcccgacggggctgagccacccatcgggcctgggtgccagggtggcagggcaggggcagtgcgcacgcggccagaggaaggtgctgagcccacagtttcccctccccgccctgtggggctgtgccagctcagccggcagccctgggcaggtgggcggggtgtgtcatgagggcgtgttgggcaggccgaccacaccgcgaatgtgcagccagcacttgtcctcaggccgaggcacgagctggggctgggcatgtgagggccgcgtctgccaccctgggggtgtgtctgctccgtctgggaccctgggtgtgacagtgtgtctgggcgtgacgtgacggggtcgctgcaatctgtggggccctgtgggactccccaggctggaattgtgcgtgtgtggcggagggtgtgggatgtcagactgagtgggtaagaccgacctgctgtctgtgaggttgtgacgtgtcagacctctgtgtggggtgtgtctggtgggactgtgacaggtccgactgtggacatgcaccctggacctgtttgtgactgtgaacccatggaggaggaggtggctgttgagggatccatttcctgtccgggctctgatgccgtgatgcgtgtgcgtgcatgacactgtttgaatcagtgtctggtgtgcggtggttgcgaccatgaccctgtggaatatatttgtatatgactgtgttgtgccaggtccctattgaagtctctgctcgtgttgtgtcccagtgaggctccgaggctgggtggtgtttacgtgatgggctgacactttctctatttgtatctgtgtatatgtgggctgcagctgctgccaaatgacacagcccatgtgttacgggccctgcaggagtctctgtgtgtccacggcggctctgagaggtgaatatttgtgtagtgtggggcaccgtccgtgtttcccgccgtgtgagtgtgtctgcatgtgtacacgcaccacatcctcatagggctgcagcgattacagccgagtcactgtgtcctagcttgtgactctgcctcttggggccagacctcagcatctctatacctatccatttgttggcatgtccttgcatagtgaactcctgcctccccactcctccctcagccctgtgtgctttgggacctgaggccagaggagtaaccacatttctacccctatgctgagctgggagggccccaggtccctggcacccagacccagtgctgccaacagctctcatgcccacaggcaaaggaaccgcagcactcatactgtccttcctcccaggacaatcactgggtgtggggaagtgaaacctaggagaaagagcagaaactgagaggcaggagaaagaggaagcaggagagaattcacaagcaggaccatagcagatgggaagaaatggagacagcagagggagacccacctgtggctgctgccatttcttgcctggacagctggtctgtctgtgctcaccctcaccctgacacttctgtccactcccaaccatgagcaagacggcggaccctctgagcgcctaggtcaaaccctgccatggctcctgtcttccttgagtgcaagttctttttttttttttttttgagatggagtctcactctgttgcccaggctggagtgcagtggtgcgactttagctcactgcaacctctgcctcccctgttcatgcgattctcctgcctcaggcccctgagtagctgggactacaggtgtgcaccacaatgccagactaatttttttttgtattttttatttttatttatttatttgagatggagtctcactctgtctcccaggctggagtgaagtggcgtgatctcggctcactgcaacctccacctcccaggttcaagcgattctcctgcctcagcctcctgagtagctgagattacaggcgtgcgccaccatggctaatttttgtatttttagtagagactgggtttcaccatgttggtcaggctggtctcaaactcctgacctcgtgatctgcccgccttggcctcccaaagtgctgggattacaggcgtgagccactgcgcccagcctttttttgtattttagtagagacagggtttcaccatgtggtccaggctggtctcaaactcctgacctcaagtgatccccctgcctcagcctcccaaagtgctgggattgcaggtgtgagccaccgtgcccagtctttttttttttttttttttaaagatgcagtcttggctgggtgcgctggctcatgcttgtaatctcagcattttgggaggccgaggcgggcggatcacctcaggtcagaagttcgagaccagcctgaacaacatggtgaaacttcgtctctactaaaaaaaaatacaaaattagccgagcatggtggcgcatgcctgtaatcccagctacccagctacttgggaggctgaggcaggagaatcgcttaaacccgggaggcagaggttgtggtgagccaagatctcgacattgcactccagcctgggcaacaagagtgaaaatccgtctcaaaaaaaaaacataaaaaaaagatggagtcttgctttgtcacccaggctggcatacagtggcacagtcagggctcactgcagccttgacctcccaggatcaagtgatcctcccaccttagcctccagagtagctgggaccacaggtgtacattttttaaaagtgttttgtagagatagggtctcactatgttacccaggctggtctcaaatgcctggattcaagtaatcctcccatctctgcctcccaaaagtgctaggattacaggcgtgagccaccccgcctggcctgaactactatcttttattgtcttcttcactatcccccactaaagcaggttcctggtgggcaggaactcctcccttaacctctctgggcttgtttcctcacctttaaaatgggtgttatcagagtccctgcatctcagagtgttgctatggtgactgaatgagttcattaatgtaaggcacttcaacagtgcccaaggtgctcaataaatagatctaactacagtagtgttccccactggtcccctgtgccttgatgccgggcaaaggaatagtgcagacaggcaggaggaggcagagagggagagagagggagtgggagtgggggaacgtcagggatggagaccccaggcaggcgcccaatgacacagagatccgcagtcctctctccatctttaatggggccccaggtgggcttggggcacgggtgtccttaaatacagcccccatgggcaaggcagcgggggcggggcggggtggggccgggcctgccggggcggggcggggcggggcgggacctcagctgcacttgcaggagcgcacgatcatgttggacagctgctccaccttgggcttgcggcccacgtagtacacgatgggcagcggctccagcgcctgcggcacgcagcacggcgccgccgaggcgcccgggttatgctggttgtacagggccaggacctgcgggcggcgggcggggtcagggctcagggctcgtggagggaggaaaacggccctccactgccccatcccccacccgctaccgcgccagcctctctcacttcgtctctccccgcatcccctcttcccatctccaattcggtctctcttatcttctaacatcctatcttattctgtctctccccacctgtctgattttctttttgttttgagactgggtctcgctctgccacccaggctggagtatagtggcacgatcatggctcgctgcagcctcaacctcctgagcgcaagccatcctcccgcctcagcctccggagtagctccaaccacaggcaagcgccaccactcctagctttttttttttttttttttttttttggtagagatgggatctcagtctgctgcctgggctactctcgaactcctgggctcaagcgatcctcctgcttcagcgtcccaaagtgttggtattaccatcgtgagccgccgcgcccgcctgattttctttctcagtctctgtccctcctcatcttcgcctcttgccttgttgtgtatctgtctttgtctctccttggcctaactctgtgtctgtatctgtctctctcattttgtctctccatttctgcgtttttccttccatctccctgtctctcttctccccttcacccccatccctctgttacttcactctgtgggtcttcatagctcatctccctctggcccctgctcagagcccctctctagcttcctgcctctctccccatctctttattcattcccctccccaccccatccctctctttctccccatcctgccaactcacctctctgactttacttctctttctctctcctcttcctccgtcctggctccccccaagcgcatctcgtagcccggtgggccagacgtaccttgctgtactgcgtgtccaggctccaaatgtaggggcagggcccgaggcagaagttggcatggtagcccttgggctcgtggatccacttccagccgaggtccttgcggaagtcaatgtacagctgccgcacgcagcagttcttctccgtggagctgcaggcaggagagacgcgtcaggggcagggaggggctaccaccatagaagccacatgcccctcctccccaggtgcgtgtgtcaccctaggttgcccccccagccctatctccatctgggtctcccttgcacccactgtgttaataacaacacaaatagtcatgataatcactaacacagattaagcacttcctccagtgctaagagcaatgtaataattaatttcacgcaatgcttaagacaagcctgtaagaagccagatgaccatccacgggggggctaaataaatcatggcatgccacaccctggaacatacaaaataacacagctccatgtaaactgatctgctctatttgtgcaacaaatgtttattgaactactactgtgtgctgggctgggatctactgtggactgaggacaaatgaaacagatagaaataggctaggcatggtggctcacacctttaatcccagcactttgggaggatgaagtgggaggatcgctggagtcgaggagttcgaggttgcagtgaactatgataacaccactgcatgccagcctggacaacaaagtgcaagaccctgtctctacaaaattttttttcaatttttttaaaaaagagacagaaatctctgccctccatgggcatgctataaattgtcttgtcactcctctgctctgaacctggctccatctcacggcaaatgcccaagtcctcaccgtgagccacaaggtgctatcaaatctggctgatctcaactccctctctcacgcctactccactccagccacactggcgtcctgtctgttcctcagacagtcttatttcggggctcctgcatctgctgttccctctgcctgccttgctagtcccacagatacccactccagcttgttccttcacttcatttcttctttttttttctattttttttttttttttttttttgagacagagtctcactctgtctgccaggctggagtgcagtggcatgatctcggctcactgcaacctccgcctcccaggttcaagcgattctcctgcctcagccttccgagtagctgggattacaggcgtgtgccaccatgcccggctaatttttttgtctttttagtagagacagggtttcaccatgttggccaggctggtctcgaactcctgaccttgtgatccgcccacctcagcctcccaaagtgctggtattacagacctgagccactgcatctggcctatttattctttttaatttgttattctttttagagacacggtctcactatgttgctgaggctggtgtcgaacttgggctcaaacgatccgcacgcctcggcctcccaaagcattgggattactggcatgagccaccacacctggccccttcacttcatttaaaccttagctcaaatgtccttcactcagggacccttaactcctaaagcagtgcctggaatgcagtaggtactagtaaatatcagttacatgactgaacatcacctcctcagagatacctttctgagccatcctttccaaaatatccaagtgactgttagttccatttagtgcaatacggtattgcagttatgcaagaaaatataaaaatgtctgcatttgaaatggggcaaaatcttaattaccgatgacgctggatgagagtttacgggcattcattatcttcattgcttttgtatacatttgaaattttccataataaaggaatttaaatcagaataggaaaaataacagttcccaatatctattactctctgcctgccttcttctggtttattttacttcttagaactgtcaaagaggccgggtgcagtggctcacgcctgtaatcccagcactttgggaggccaaggcgggtggatcacctgagatcaggagattgagaccagcctgaccaacatggcgaaaccccgtctctactaaaaatacaaaaattagctgggtgtggcggtgcttgtctgtaatcccagctactcaggaggctgaggcacaagaatctgcttgaacccaagaagcagaggttgcagtgagccaagatcgtgccactgcactccacccagggcaacagggtgagactctgtcttgaaaagaaaagaaaaaagaaagaaaagaaaagaaaaagttgacaatgccttttttttttttttttttttttgagacagagtcttgctccgtcacccaggctggagtgcagtggtgcaatcttggctcactgcaacctctgctcatagattggtggggccagccaggcacggtggctcacgcctgtcatcccggcactttgggaggctagggcaggcagacttgaggaccctgtctttactaaaaattcaaaaattagctggacctggtggcgggcacctgtaatcccagctactggggagtctgaggcaggagaatcgcttgaacccaacttcaagtggcaccggataacctagaggcaagataaagcctttccaagagccacagaagcctgagaaggaagtcaagaaactgagatccctgtgaactcagcccgtaccacccaatttggttggacctcagtttcctcatctgttcagaggtaggagctactagataaaataaggtgt

SEQ ID NO: 73 - DNA, 29494 bp, Homo sapiens
tgggaggccaaggcaagcggatcacctgaggtcaggagatcgagactgtcctgaccaacatggtgaaaccccatctctactaaaattagccgggcatggtggtgtacacctgtaatcccagctactcagaaggctgaggcaggagaatcgcttgaaccagggaagcggaggttgcaatgagctaggattgtgccactgcactccagcctgggctacagagtgagactctgtctcaaaaaaaaaagaaaagccatcgtgctgggcacagggcactggccacttggctcccacaacacaaatctcccaggagcagcagagagcacgtaggggctgccaagggccaggcagagtgtgaggggcttcggaggggtgggaaacatcctatccatccttggcggtgacgattacacgggggtgctcatttgcccaaatgcattaaactgtccacgtaaagagggtgcctctcggacgattttagggcagagacgtccgtgcctgatactgtcctggcagccacgtgccctcatacacttgcccagaccctgaatgtgctacacggagtgaccccaattacaccgtgggccccgggtgactgcgacatgtgagtgcaggttcacccacgtcacagacgaaccgctccggtgcagggggagctgcgcacgtgggggcgggggctgtggcgtgggacctctgtaccttctctcaatttggctgtaagcctacaactgccctaaaataaagtctctttatttttttttttatttatttttacgcagctctcttttccttaaaataaaggctctaaaattgtgtgattccacctccctgaggctaagcgaaagagccgcgtctgcccctgtccttcccgggggctggcagggagtgggtgcccggcggtgactcagccctgcagcctcccagcccttccccgtatgcaggcaggtgatgcggacgcctccgaccctcgtggggtttgtggagagcgttgatcagcgctgccgtcagaacaggacctgtgcgaggcctcgcagatgccgggagccgggcggtgctctcggtgcttctcatcaaatccactggctcttcgagaggaagcacatgtcacagcccagctcaaacaagaagcaagaaaatcactcttcattttggaattgtaaaataaagtagaaattatcctcaggctagagtgaccttcccgtcctgccccagccaccccccacctcccagcacctgccggtaacagccctgcacacagccccgagaccctccgccaaacccagcccaccacccccgggagggctgtggaagaggctagagagcgcatcccctctggctcctggggtggaggcctgctgtgggttggctggaatcagcccccctcccccgtgtcctgggcccctgcagccctgcgaggcggacacctagccacccctcatcccagggaagccagggccagggaagggcccaggaggggagggttcgcccttcctgctggatgtcgttcctttaaaaatccctgccgctggccgggcgtggtggctcacgcctggaatcccagcactttgggaggccgaggcgggcggatcacgaggtcaggagatcgagaccatcctggctaacacagtgaaaccccgtctctactaaaaatacaaaaaattagccgggtgtggtggggggtgcctgtagtcccagctactcgggaggctgaggcaggagaatggcgtgaacccggggggcggagcttgcagtgagccgagatcgcaccaccgcgctccagcctgggagacagagagagactccgtcacaaaaaaaaaaaaaaaaaaaaatccctgctgctggagtggttgggggagccggctgggggtgcagactgtggtgccactgtggccgccgccatcattgtcaccatcatcagcatcaccatcatcagctgccatccctgaaccctcaggctttgctggtggctgggagggaggccgaggctggcatggcctgctgccctgacctgcttcctgaacgctccggccacccaggcctgcgtggagtagggtccacgggcagacagatgggcaggccccttaggcagagcagccctccccatcccggcagtgtgggggtctgccgggcagcctgagagaggagtttccagtcattgcccaggcaggggtggctcaggaagctgcagtcccccccaagaggcctgatggtgctgggcgggtttgcagcatcccggctgagagtccagttggtgtcacctgggccaggatggtggccagtggcagcagcaaggatataggcatgggggtgtcctgcctgatgcagagtcatggccagggcctggggagggacctgccccgtgtcccctccctgcctggggaagggcccggaccaccttcacacagtcaccctagggcactagtggggagtgaaggagccgccccccagagcaggacagggagctggtgtggagacatgcaggacagggcgctaggatgcaggggtgcagggtgctggtgtggagagatgcaggacagggtgctggggtggagactgcaaggtgctaaggtggggacgcacacctggcagggctggagggagcacgggctggtggcagccttgcctctcaggctgctccgggccagggtgacttgggaaagccaggctcgagaggtgaggcgttgcctggggtcacacggctggcaggaatggccagggctggctgcaggggcccgcactgccctcccgcctccaccagaacccgctatgtttattcagggacgtgagggggtgcccaggtccagcaggtgttaagccgagcaaagcctgcagccccaacgagacagccacgggagctcggcaccctcagtcccccagacagggctcttcccctctttgggcctcagtttacccataggtgaaaggagggcacagttagatggtccctaaggccccagggacccaggccagccttgccctccccccagccccagcagtagggcatctgagcctttcatcaggaaaaggagactaaatttatgcctcaggccccctctgcgcttggcggggcagaggtcaggcttccggcagcccccaccccttgacgcagttccccttcccctctggggggctctgggggggctctattgttctcgagggctggttcccaatctccccgaacactcacttcctgtttcctggctgagaggaaacagagattcctgaccaggcagatgcctttttttccctttctctctttacattttttaagggtattaaataatagtgataatatgacggcagccttggtgctgaggagtgtggactcggggactggaggaagcccagggccacctgcatggggctctgttgaccctccttcgagaatctgctggaagctatggacccctcctccctccccaccagggaagggcccaggcataaactgtgtgcactgtgactgggaacagggagaccccggcaccctccccaggactcccaagaccctccacgccctgatctgacacgtggggaaactgaggcagacaagctttcagggcacctatggtccctgaccctaccggagctctatgacaaccccgcaagagagacagggatgaagcctccagggagggaccctcacacccttcccagaagcccacagaccccagacacacgggcatccccaggggaggggccccccaccactgtgccttgcggagactggggtccctgtggctctgggttccagtccagccctgccggggaaggccctgggagcttgagcagccactcccatggggcctcagtttcctcatctgtagatggggtcagatcattgcctccacttcgcagggccagggcaacggccccaggaggagacacccgaacgcagcacctgctcacaggcgtccaccgtctctcccgctattttctcccctaaaagcttggagcgcctggtccccagctctccccacacgggcaggcggggagaggacagggcggcccccagatctccccaggcgggcaggtggggagaggacagggcggctccagctgggggccgggctgctgaactgccgccacctcaactggctgccccacaggccctgagctctcgggaacttctccttccgtcgcgggagatgaagtgctttttcctcttgacgttaacggctgccccatctgtcgggcctgggcaaatcacagcccaccgagtgggacttctgtgccatgtactggcgccaggcgtgagggcagcctcagggggccggcaagtcccccttcctcagccccatgggaacctcagcaggggtgggaagcagtctccagggcctgcaggagcgggatcccagaagctggacactgggaccagccccgttcgtggcgctgaggaccccgaagggacacgcgaggccctggcagctgcattgggtggggactctgaactcactcgagggtcacatgaccctccttcaagaatctgctggaagctacggacccctccttcctccctcctgggaaggacccaggcacaaactgtctgccccatgactgggaactggagaccccgggaccctccccagggctccgaagaccctccatgccctggtctgacacgaggggaaactgaggcagagaagccttcagggcacccatggtccctgactctactggagctctatgacaaccccgcaagagagacagggatgaagcctccagggagggacccccacacccttcccagaagcccacagaccccagaagcacaggcatccccaggggaggggtgccccacacactaggggctccatctggggctcacgctgctccacaaggctttctcaagtcagaccaccagtgcccacctcgtgagctgccaggcagcacccagtgtccatctggggacccctctcccaggctcactccacagtggaggcctcttctctctcctcccctccagactccctgggtgctgctggggacatccacggagcctgcagcacacagccccctgagcccacactgcgctctcaccccagccaggtgtctcccctgtgaagcaagtctctccctagggacggattctgctgtttaaaaaataagattttcttcaccttcctacatgaacaaaaataacaatacagcaataccactgcaaaatcatcagaatggctaaaatgaaaaagacagacaacagcaagtgctgacaagggtgtggggcggccaaatgctcctgcactgctggcaggggacctgagaactgcagggcattccctggcttcctgcccctcctgggactggggaccccccagggacagcctaagggaactgcatttatcttcacgtctgccaaaagataacacgaagatgttcaaagctaagcccccaggctggtaagagctccaaggcaccagcagtgtgtgcagaactggggggagtctgttctcccagggatgctcccatcacctgctgccagcagtggggcatgccggtcccctggggtgtggccaaggggctgtgtctcctgcccgggctgccggcccctctcaggttcactttcccatctctaagcccacgtctcgctgcagttcaagtttgccaggccaccaacgggtgacacgcccggcgcagtgggggactccgcactttctgcgcacctgctccaagtcacctcttccaggtccgggtccctgccctgtggagcgcgcacccgggcaggggcatggagcaccggcaggactggactttgtgctgagtgtggtggcgccttaggaggaggtcacacaacccgatgtgtccctccgcgaaactccctgagcactgggtgtgaagggcagcggcgcccagcaaggccgaggaggggcgactgttatccaggcaggaagcggggtggaccggaccagggtaggggcaatgtcaggagaaggggacactcagatgcaaagccggtggggacctgccaagaagccagcccacaaggccatggactcctccacgccatcagctggagcagtgggcagccccaggaagggagacgggagcggccaggggaagggcgaggggtcccccgggcgacccccgaggctcaggcgcccggactccagtcctgggcctccgttttccacccttgaacaagcggcttccacctgtgagccagctgcctcctctgaaaatggaagcccctcaactcagagggtgtcgctctgggacgtgggtcaggggccggagcaggcagggagaggtgagaggaaaggctggggaccctcacttctccctgcccaaaccctcgctcgggagcagacggctcctctgcccgcaggcacccctgcctggcagctccctccagcccctgtcgggtccgggacgtcctctgatgggaaggttccaccacatccgtggctgacagagccagcccgtccgaggccggggggcgctcggggtaaacaggaagccccatccctcccgcactctgcttcactccctcctcctgcacctcctgcagcccggctcccgcggccgcgcctggtgcccctctgtctcgcgccacctgagatgcccaggctggcctctgccaggggcttagtctgccctctcctggggcttcagaggccaaaagcaccctggtgaggggtccgggaggcccgggagggcccggggggctctgccaggcccctccacgcctctctgcccagccagcacgctctgggaaggtaaggcagcccttccccttataactaacctcagaacattcccaggtggctggaaggccactggacaacatggccctgctgacaagagagacaatggggaaactgaggcctgtgtggggcacaaagctgggaccagagctccagcttcctgcccctgccgggcctccacctctgacaccaccccaggcagggtgaagccctgggctccagaccttccagtgcccagatgaggacaggcgcaggccttggggtggccacactctcccaccaggtctccccctctgtgctgggcccctgaggtgaggggaggaggccaggcgtggggcccggcctggcttctgtggggctggagcctgggcaggaggcactgctgactcccaaaatgattccctgctgaaggtctgtgccatgatcccaaacacacaccaccagagcggccagggcagggaagggggcacctccaaggaccggagggtgagggaggggcccgcctgccccttgctgagcccctgggccttgggcacagagtgtgctccacccataccagaacccgggggcagccccaaccccctggacccccagtaccctctggcgtccaagaacccatgtctgtcccctgccaaccccccgcccctcctgtccccgctgggcccccgacattagggcaaggccccagcccacctcctgtacctgcctctgaggctccaggagcccaagagagtggagtgcccctcctgtggtggctccaggctatgggatagggcaaagctggcactctgggcctgagcccaggcctccttcccttggggagggtctagtcttggcctggggaggggctgggggcagggcagagcttatcaggagggggttgcagtgaagaacaagttggcagcaggcggtgcccagccccccaggctgtcacccaggagtccagtgccaggaggacagcctggggaggacgcagactctgccctcgccccttgcctgtaagcacagcagtcagttcaccgggaaggcccccagcgggccaagccttagcaactcgtgcactcggctacttagctattcctgccccgagctgtcccctggccggataggtctgatgacaggggctgctccaggttgggacataggacaagctggggtgggggacatggggctccccaagaagaggaaggaagggtgaggcagcctcctgtgccgagcatcccagccctgtccggcctccaggctcacctgggccggtcacttctccctctgggcctcagtttccccctctgtacacagaaagggctggatctagcccaccccatgcttgtgggtccttccaccaggaggccagggcagatccaggggcatgcaggtgggggaggagggggcaggccgcagggatgcaggcagagggcaagagggcacctcctgggatgggggcacaagcctactgggcccctatacggtggagtagctaagtagccgagtgcacgagttgctaaggcttggcccgctgggggccttcccggtgaactgactgctgtgcttacagccaggggcgagggcagagtctgggtcctccccaggctgtcctcctggcactggactcctgggtgacagcctgggggactgggcccggcctgctgccaacttgttcttcactgcaaccccctcctgacagctggagggacaggctggccagggcaggatgagcccctgggtgggagagccagggggccgagggaggcacagggcggctgagggtgcagccagtagggtaagggccagatcccagggtggcctagtgtggaggaggtggggaaatggggttctgcctatctgctccaacctcagggcaggggccacctctggaaagaggcccctcccgctcagaccagcggtgcctgggtgccaggagtgcccccttaaaccagctcagtgaccatgaagcaggtgcagaaacaggcccggagaagagtgaggtcctgcctggctgaggccctgagccctgaccacagcctggcgcccagagcagacccttcccctggccgtgggtagaggggagctggttcctgcttgagggggaggcgcatcgcgtgtgggtgaggtttccacctgccctccaaagtcccgtggggaatttccccagctgccccagcctcccttggctcaagttgcccagctgagtggggctggagaggtgggggcacactgaccgcccagggccagggaaatgggggtgtcccaggcatcaggccgacaggggctgaccccaaagcagggctcacaccccacggacagcggggttgggagaggccctgctctcctggggttccaggcgtgccctccaaagccacccagctcccttcggcaccgtgtcccctcccacccagcccacctttgccacagtggctcgctcggcctgaggctcccactgccgtgtgaacagggaagctgagggtcagacctggaggctgggacgccgggaatctgacagagcaccccctgtgatcacccacagtgtcccgcatccctccccacacccccggccgcagcctgctgccagcccagagcacccctgtgaagtggggctgagggcattgggcctgcttgcccatctccagggcaggggctcacagcctcactggcagctcttttaggggagagagcttggactccatgcttgtcccctcccgtcaccccctcaccatgggcctcagggacccacggaacaggctgttctcggaccgctcagcctgtcttgccaccccagtcccttcctgccgggcctcgccactcgccatccctcactggtcaaggctcctgtgtggctggtccctgccttggcctggggcccctccaagctcccgtgctgtgtcacacacatctgggggtgtcctgggggagggcccagcatccttggcccaaagatgcagcagctcccttctgtccagccacacgtgagcatggcctgtgaacccacggtcctgggagggccctgggcttgcgtcctccaccccacactctccccagggtctccagcagggtccagccctggtttctggctgttttggggctagactctgatggcccaggggacggcttccccacccctgggcagtttgtccaggccccctcacacggtggcccccacccccctcagcctcctgtttgtccgacgacacgtccccgttatcagcggagaacacacacaggaagtccggctgggaagggcccatcccaatcccgattacccaggacggagcataaaaagccgcccttcctcgcccggggggagcctccctgcaccaagctggccctgcacggctgcaagggaggctcctgtggacaggccaggcaggtgggcctcaggaggtgcctccaggcggccagtgggcctgaggccccagcaagggctagggtccatctccagtcccaggacacagcagcggccaccatggccacgcctgggctccagcagcatcaggtatggcaggggtggcctcggaggggcagggagcggacagggcgggccccccattcccctcactcccgctgaccgtggcgcctgctggctgctccgcaatctgctccccagcgaggtcacaggggaggggtcccagtctcctccccttctgcacagaggaggccactgaggccccttggccaaacgcctgctagtgggtggcccagcgtagatcccaatccagtctgctgactccaacacttcacccccagtcgcccttcccctgaaccccaccctctggcctttctctccctccgcagagcagcccctgtggttggcagcaaagttcagcttggctgggcccgctgtgaggggcttcgcgctacgccctgcggtgtcccgagggctgaggtctcctcatcttctccctagcagtggatgagcaacccaacgggggcccggggaggggaactggccccgagggagaggaaccccaaagccacatctgtagccaggatgagcagtgtgaatccagggtgcgggacgtggggctcgggcttagggatgacttgctgggtgcggtgggcaaatgggtgactctgtgggccccccttggaccctggagacgcccttgttctccctctccccagcctcatgcagagtggctgaagccccatcccaaagcctccaaaaccacagtgggtcctagaaggccccactttttgtctcatacgtccacaccaagaagcctgtctgagaacccccactttccaaatggtgcctagccaggatgggggcagcgagggctgagtcggggcagccctggagctgccctttctgctccatcgcctcttccagactcaggcaggagaggtggggaggcaggtcaaagggttaagtgaccgcagatccagagatgaggccaggggcaggggacagggagggtggcggtggctctcccacccagaggccccctaggccccactctgaacacttcactgctgggggctaggtaagagctgccctgcgtgggctcagggcgccaggaggcctaggactccccagtcagatgaggaacgccccctgacagcagctgctctggtcgtcccttggaccacgtgccaggggcttccagggcccctggtccagagcagtggccactggattgcagggtggggcggcctcattttggggactcctctccagggacctgggcccctcccttcctccagctcccatgcaccaaggtaggaccaagctggtggccctctcggacccatctgcaggccccttgcccagcaccctgggttacatggagagacctccagctccactcacagcagcctcccatccccatgccagggagtccagggctggaggcaataaccccattttactgaggccaggggctgcggatccgagaggacaatcagctcaggacaggatggggtcggggtaggtgcaggacaggggcctgtaggcctagtgcaggcggaggtcccacagcagcaccgaaagctggtcccgggccccttcccagcccccagacatcagggtgaccaggactgtgcataggcactaacccacgactcctctccaaccagcagcccccaggaccggggaggcacaggtggcccccaccacccggaggagcagctcctgcccctgtccgggggatgactgattctcctccgccaggtgagtcccagcaaaccccttgctccgagggaacacttctcacaccggcgcccacgcgggttatgacacagggcgctggctccggctggggtctgaggggctgctgaattgggctggcccgagccccacgtgccgcgcccgcagtaacagctgtaacaattgttgtgtggccacgacctcaccgtcactagatcccagggctgtttagccccatcttataaatttggaaatggaggcctggagaagagaggtgaccagcccagggacctctggtgtgaggagactctctgggggcctgtggattcgctgggaggagtgttctgcgatggccctgactgtgctgaactcagcagtgacccagtgaccccggtgagggtgcctgatgcctgagagagggccaggtgggggccggcgcaggggcccccaacctaacacgctaaggctaggaggcaggcctgggctctgccatgtggtctcagaggagatctgggtctctgggcctgcggtggggacggtcatgatgcccactgcctgcgaggctgcaggacccagctcagtgctaacctgcgccgggcgcctaccgcgcggccccccagcggctgagatgggcgtcccggggtggttttcagcctggggggcttgaaagctagcaaagggcccgcagccccgtcagtgtgggcgccctgggcggcctctcctggctcctggcggccgggcttggtcgtgcgtccccagcgaccgcgcagcgagcgccctgccgcggggactcgggccccaggattcccggagggggtgctggcgggccgcggctcagaggcgcgtttgcgtcagccccgggttccagcagagtcactgcccgcccgggggcagctcgtccgccgcggggcctcagtttccccgtctgcgcaatgggggcggggcggggccgccaggtggggcggggccgggggcggggcggggcggggctcggggcccccacggcgcgggctcgggcggcagtggcggcggcgcgtgcgcgccccggatccggcggtgagtgcggagcgagcggggcgcgccggggtcggggtccggtcgccgcccgggctgggtcgagggcgggacccgcggagcccccgggggcggggaacctggccgcgcgcggagctgggggcggctccgggacgaggcagcgcgaccgctggggccgggggcggcgccctccctcgtgggccccgcggtccccagccctgctcccgccgcgaggggtccgtcagtgcctgcggcgcagccaggcccctccctctgcggacccggcctctcgcgggtgggggctgcggggctgctgccgggcaggtggggagggagcccgtgggcgctgggggcacggggaccggactgctggtccacctggcgccgccgccccctccccgcccggcacccctgggtcgaggccgtggccccccccggggaaatggggcttgcagcaccggctcggagagcaccacgggcttcctctggcctcgggaaaacatgactttcaaaaattgagtctccacttagcaccgcttcctgtccaggcgactctcaggaattgtgggggggagctgtgccaatatgtgtggggggcaatgaggtctgggagattcgcctacccccaggcccgccctggcatccccctgcccacatcaagccgccgggccgctgccctacctcttccttcccgggtcccactccccaatgtcccccgacttcgagtcttgccttgaggtcgcaccagacccagcccctaacagtgtccttcatccagggcccatccccagagttaatctccagccagctctgccccctcgacaaactcctgcccaaaaactgctgtgatgccccccctgcccccaagctaagtccccacccctcagctgcccagggcagcctctgcctagttggcagcctctgccctgccctcctctctccagcgcacagaggactggaggcccaggaaggacccccagccaccctccccgctgggaccgggtgatgccttggcagtgcccgtgggaagcaggtgtgggatcgtgctccacacccagtggggctggccagcagcgactgaggacagtgtgactatttataggactggctgtcagagctgaggaggggcctcagagaccctattctagtgtgtgaggaaactgaatcccagagaagggacagccttaccccagcctctgcccccacccgaagcctggcctttccctgcggagggccctgcagtgcctcggaaggaacccacccagcctttgggaagcacccgtgagaggccctgggtgggaccctgcagcatggcaggggctcgccaggtctccagacccctggctgcgcataggacagaatccccatccccggcattgccacagaccattaattctgggctctcatgctctcaggaagcctcacccgggcccctggctcctgctgcacagccaggagggggttggattccggttccggtgacactgtcgggggctgctcctcacccccaggtgtgcacctggcacagccactgtcccaggatccctggaggctgattgcacacatatcccagcctgggaaggaccccctctaaaatgaaggccgcccctctggtggtcttagaatgtgtgcaccccccgcacggttcctgctggcttgcagctgctggcccacctgctggggccggttccacactcagatgagaaatcaaattccagaagggctgaggccggcaggtccctggtggggctggatcccagctctgcccacgaacaccccgtttgcatagactggggtgcaaactcacccctgccctgctgtgaggagggccctggaaccaggcaggacaggagaaacggccacccgtagctggagccatccttcccggagcctcgggcagatgcccagcaggatccactcgattcctgcaccaagagctctggacagcgtcaccccccctgtgcccccaggctgtggccccagctgtttgtgcctggcgagggtctggctagctggaagagggggccagcggaggagagagtgggcgccaccgtggggctgtcccaccggtggaggctccagcggagatgagctgggcaggcctcgcggagcaagtgcaaactgcacccgcgtcctgggggcatctgcggggagacttaggggtcatgctttgtgccccaggccacccagaggagaaggccaccccgcctggaggcacaggccatgaggggctctcaggaggtgctgctgatgtggcttctggtgttggcagtgggcggcacagagcacgcctaccggcccgggtgagccaagccctagcctgggagtgctggggtggggggaccgggagccctcagcacctcctagaggcggccctcagcacctgtcggggactccctgggggctcctgctgagggtcctgccccggccacatgttcccatcattcttgggtcctgctctgggactcctgggctgaccccctctccacccccgcagccgtagggtgtgtgctgtccgggctcacggggaccctgtctccgagtcgttcgtgcagcgtgtgtaccagcccttcctcaccacctgcgacgggcaccgggcctgcagcacctaccggtgagtgccccaccacaccgagctcacccagccccagcctcccaagtcggccacacatcagcatgtcaggggcgaggcgggggtgaatcctgggacccaagatgggaaactgaggccagagccatgagagggctgcctgagatgggcgacccagggcggccggagccaaggggttccacgatcacctccagtgtcctaatccttgctcttgccccgacacgtctcaaaggaccgcacctctaagagcatccccatgtttagaggggtcacccatcctgtctgcacccctccacttccgggggactaacccctccctaccctggcatccctggctgcaagttcccatatacacagaatggtgcctgactcccctggtcccactccactgggcacccccctccacatgacggcccccagtgggcacagatgagaccctgaaatgtcctgtatgcccacacaaggggcacacacccctaagtctcagagtcctccttcctgggtgtgggagctccaccccctgctgggggaggggcctgggaattcagacttctggaggtttaagaagggctccgatgcccagggcccacactctgccgtgactcgccgtaggccgggcacaccctctcctctgggcctggatgcccccacagtaggagaccagataggtgggggcacacacaggcctggccactgcctctgctccatgcggagtgtggctgggccttcctgctgtggcttgagtcccggccagcaccggaaggcccaggcagggaaacggctgtgcagtgacccctcagtgccatcccttgaggagaagacccttgggggcatgctggggtgaccctgtgcactctgagaggggactctagatgcccagcaggtgactaagggggagtaggatgcccctctgagctgtcccacccaccccacagaaccatctataggaccgcctaccgccgcagccctgggctggcccctgccaggcctcgctacgcgtgctgccccggctggaagaggaccagcgggcttcctggggcctgtggagcaggtgagggctatgtccctcggcgcccggtgttaggagggcgactgttccccaatcttccagcaacgctcctgctgcttttcttgaaccccgagcaaagcaccaccttgccgcagagcacccactccctagcagctgcccccacagggtgctggggacccaactgagctggtgaccagcctcccccgcccacagcaatatgccagccgccatgccggaacggagggagctgtgtccagcctggccgctgccgctgccctgcaggatggcggggtgacacttgccagtcaggtgaggctggctctaccctggggggccctggaagggtcctgggcacctccttgcatgtcctggggttactgctggcccatgagtgggtggttgtgaagggagctgtgtgggcaggacccctcccgcaggcatggccgcctgacaccccgtttcctgcagatgtggatgaatgcagtgctaggaggggcggctgtccccagcgctgcgtcaacaccgccggcagttactggtgccagtgttgggaggggcacagcctgtctgcagacggtacactctgtgtgcccaagggagggccccccagggtggcccccaacccgacaggtaaacagccctggctgtgcctggcctggggaggcgggcaggcagtggacattgccgtgtggctgttaggcatggtggggggcactggaatctgggcggaaggcggtggggactccctctccagggagggaggatggggagggaggataggtgggttcccgagaactgggggcaggttgcccggagcctcatatcagccaagaaggcagaagtgccccgtcccggggtcctgtctgcatccagcgcagcattctggaagacgccacgcctccgctggcgacgggacattattacttttggtacgcgctgtgacacttcaaactcgtaccgtgagtaataatgcgccgtccacggcaccgcatcgaaagcgccgctgagacctcagccttgacctccctcagcgtggccgggaccctgagcctctgcgcagagccacccgccccgacgtacttaggcggcatagccctgagacctctggccagcgccaggcaggcagcgggggcggcagaggcctgggcctgagtcttctggctctgcctctccctggggacaggagggagcctgggggtgtgggtggggagccggccggccgtgacccagcgcctggctctgcccgcaggagtggacagtgcaatgaaggaagaagtgcagaggctgcagtccagggtggacctgctggaggaggtgaggcattggtggggggggggggggcaggcagtccagggtggacctgctggaggaggtgaggtgtggaggggcaggcagtccagggtgaacctgctggaggaggtgaggcatcgggggggtaggcaggcagtccagggtggacctgctggaggaggtgaggcgtcgggggggcaggcagtccagggtggacctgctggaggaggtgaggcgtcgggggggcaggcagtccagggtggacctgctggaggagatgaggcgtcggggggggaggcaggcagtccagggtggacctgctggaggaggtgagacgtcggcagggggcaggtcttcacaacagcagaggcccaggcccgggtacaggctccgtagtctcctgggacatggtcccgacccacggatggctgggggtggtctgaaaaggtcctggccctggggaggtggcttcctcgctgctgactgccgagggggccctggcctggatccatgctgggcagaagcagctggacactgaccaggaccccccagggccggaggaaccaagcttgacagccccccagacaatacacagagcctggacccagacgagacctccccacccccccatctttgtccccaccaggacaaagagctcttgccagtcttcccactggccagtggtccagctgtccccctagttctcctgccagggaccccaaggctgggaccaccccgccagcctgatgccccaggcacccactctgcggcaagcttttctgccacggcagccccctctagtggacacttggagccctgccgcggaggcgggggctggaggcttgtggagcccttcccaggggtcctccctagaccccggtggagcagagagggcgggggccggcccagggtcactgcccttctgcacccacagaagctgcagctggtgctggccccactgcacagcctggcctcgcaggcactggagcatgggctcccggaccccggcagcctcctggtgcactccttccagcagctcggccgcatcgactccctgagcgagcagatttccttcctggaggagcagctggggtcctgtgagtgcccccaccctccagagccctcctcccgggtctgggcccagtgggcctagaggggctacccaggcttgggggtcgggggcgaccaaaggccaaggggccagtcagatctagctgggcggggaggctgtggggagcagtgatctctgaccttcgcctcatccaaccctaggctcctgcaagaaagactcgtgactgcccagcgccccaggctggactgagcccctcacgccgccctgcagcccccatgcccctgcccaacatgctgggggtccagaagccacctcggggtgactgagcggaaggccaggcagggccttcctcctcttcctcctccccttcctcgggaggctccccagaccctggcatgggatgggctgggatcttctctgtgaatccacccctggctacccccaccctggctaccccaacggcatcccaaggccaggtgggccctcagctgagggaaggtacgagctccctgctggagcctgggacccatggcacaggccaggcagcccggaggctgggtggggcctcagtgggggctgctgcctgacccccagcacaataaaaatgaaacgtgagctgctgtgtcagtggatggactgggggcctgggaggagggcgctcacctcctggccacccctcccagacccactgctgggtgccagctggcaaagggggcctggtggagcgggcagtcgtggggtggggagggggtccaaggcagagggggtgggcaggtggtttctgtgaggccacagagagctttgtcctggggacatgttggccccaaccagaggccaaagagcaaatctctggcctccttcccagtagcctgaggatcccggcacacttgcccgttaggcgacacccccacccatcgatggaagtagtatagggtgatgtgggtccactcctggatagggaacacgggtgggtggcggtgcctgcaccctgggcctctaggcagggcagctgggaagacacagcgtcgcctccaccgccctggtcacctgcccgccctgtgagtgaccacagctccccagccacttccaagagtgtgtttataaaaaaacagcaacggagtacagtgctgaccccacagagtcttccaggccagcaggagcagcaggccccgattcccggctccctgtggcccagggtgcgtgagtctgggactcctggccctccaggcccctcctctcccagagagcctgatgcagcttgtgggctggaccctggagcccagctgcaccctggtgggtcccaggcggctgagcagagggctcggacagtgtgcgtctggcctcggggtcctcccatctgctcctgggccatcgggggccttgtggctcagcccaccagcgggccacagccgcaagcctcatctttatcatcccagctcccagaggtgccgtgggcgcgagtccctgccctcgagcccggggagggtccagctgagccccctgcaggggacaccaggggcctgtgtctgagaccagtgacagaaggggcttcctgcttcccgggctgagtgagagctgggggagccggacagagtggtatttggaagccgggaggagtcccctctgcccatcctccagccatcggcttccacctgccctccccaggtcatgccctgccgtggtctgggctactgggccggctgcacgccagaccccgcagtggccccgttctcctggggggtcttggagatgtggaggaaggtggtcctcatggcccggtggcaggtgtccacgagcgcagggacgtccgccgcagtgaggccgctggtggggatggcttccagcacctgcactgtgactgttcctgtgggggaagcaacagacctcagtggcctgtggggagctggggcccacctcagcctgctgccctggcctcgcctctccccagccccccacagcccctccctgggaagcccgaggccgggctcttcccctggactccctagccgtggtgggttattttaattgcagtaacgttgctgcagtaaaccccatggctgcctggccttcacgccgcattttcgacaagtctgcgctcccctgttactgcccccagaaagccccacttcctgatcagcccctacctcactgcctggcctctgccctccatacggggcgaggggctgtgggagagatggagctgggttcccccactgctctccaactttgaccccactgtcctgcctgggcaccaggtgcccacgttctgggaactggctggaaggggcaagaggtcatgagccccgcagcctgtgcccctgggctgcctgggttccatctaccctatgcgggcatcagcctggacacatgggctcagaggccgccctccaggcccccaagctgtgtgcacagctggggtccatccgtgtgaagtctcttggagcctcagttttctcatctgaaaaatgggcccagcaccacccatctcacagggccatgaggccatgaagcccacagctgggactccagcctgagtcactcattcgccacgtggtcaccgtgtggccacgccacgggtgccacccggaaatgggaacgatgaggggcccggggctccgtgactgtagggtcaggcggggcctacaccccgggtgcacacatgtgggggtacctgaagtgaagaacttcttcttggtgttgtagaaggaggagaaggaagagtacaccacggggacgatgggcacctgcaggcagggagacgcacagctgaggcagccctggggacaggccaggcacaccccaggctgcatgtggttggggagccctgtcctgcggcccacccacccctgccttcgctgctgccatgggtccttgtggctgtcctgcccctgggacctgggatatgtgtcctgctctggttggcccagagttccataagctcatcctgcaaatttttactcatctcctctaggaagccctcctgagctagcacgtgtttgcctggttcacacctgtccccatattgggtctgcagctagccaggggggcagggccctgtccggtttaggaggagattatggcactcttccctgcccacgcctctctcccagtcctctccatctcaggaagccagtgagggaggcagccctagcccgggggaggggtggagcctgctggtgttcctggaagtcaccggggtcaaatccaagggcacttgggggtgatcattaacccgaggcagccagggaacctccagggggccagcaggtaggctggggactggcagcaggaagggagggggccagcaggtaggctggggactggcagcagggagggagggggccagcaggtaggctggggactgggagcagggagggagggggccagcaggtaggctggggactggcagcagggagggagggggccagcaggtaggctggggaccgggagcagggacggaaaagctgtgggtctcctggctgaagctgcactgcggccacccccagccaccccatcacagccgcccgtctcccctctgctctcccagagctgatccagccctcactctgcccccaaagggaagtgacatcagccccaggctgggcaggtgtgccccgcacctgggcagggctgggatcagagcccaaggatgctcacccagcccagcgcctccggggctccccaggcctcacggccttagctgggagcctctggaaggagggccccctccccaccaccttgcacagggccaggcactgggggccactagtggccagtgtgagggaaggagctgagacccctgccctgagcgagaccccacccagatgggtaaaagctccttctcctgacgcaactcttcccagcacagcggcagaggcaggacaggtgctgggggaatggctataccctggcctctcccagacaccctaggatgcactgcacccctggaggctggggaccaggaagtccagagtctggaggcgctgcttacaatgagctccacccaccctgagctctggtctggcctgatactacaccaaaagcctggcttgtccagacccactgcccatgccctgaagcccaccccagccaggcacaggcccagaaatgagcctcctgagagctctgcagcagaggcgagcggcccggctccccacccctctacctgcccagcctcgcaggccaagcactgggtgcccaccaagggcagctggtcactctgggctctgtgtgggcaaaaggcccaaggggctgccctccctggtcggtcagggggcaagtgcaggaaggggcaaggaggccctgtccccaactcagtgggaggagtcccttgtgtgtcaagggtcctcagctcggctggtggtcacctgctgccttaagccagcctgaccccgcctccccagcctgcacccacccagggagggctgggctcagcctacctgtgcctggactgccaggtagaaggcgcccttcttaaaaggcagcaggtccccattgtcgttgcgagtaccctcgggatagatccacactttgagctgcagggagaggagagcctggactgacctcacgcccaggccaccccagaaaggccacgccgcctcgcctcctaagaagccccacttcgcaaagcagctggcatgggaccccatctgcggagcatggatgatgtaggggtctggcgtgggaccccacctgcggagcatggatgatgtgggggtcttgttttttctgccaaaaccaagtcacaagctggcccctgcctggccccgcccaggccccaccccaaccccaccgagcccggccctgcacactcacgttctccctgaccatgcgctcgcccaggtcggccatcactgtcatggcagtgctagagcgctgccggttgatgaagaagacgcccccgaggtacatgatgaggcccacgggccccaggaagagcagctcccgcttggcgatctgcacgcagcgctccggaaggacctccatgaggcctgggagacagagagacagagacagagagagagggggagacagcgtgcgctggaagacagctgctgagcacccacaggcctgcctggcaccctgccttctccctggctacctggacgggtcgtgtggcctccgagcctctgtgtctggccctgagggaggtactgaggccgagctcgcccaggcacaggcagccctgtgtcctcgtccccgggacccagccccacacagccccagctcagccggccccactcaaaccccagaagccacccccgaggcccggcctacccatcatgtccaggatgctctggtggttggagacgatgacacagggacgggcctcctgcagcctgcgcgggtcccgcacctcgaagcggagcccgtaaaagtacttgaagcttcgcacgaaccagccgatgatgctgcaggggaggccaccatgaacacgggtcccacagatcccgcagccgaggctggggcgggaaggcctgggggtggggtgtggaggaggctggggaggggccctcctggcacggggcaggagaccgggagacacaggggagggagcccctgaagcggacagagtcccgggcccggctcacccacctggacggctgccctgcctccgtctccccagcaacagaggaaaacccagagcctctggaactcggatgctaggagcatgggaaggcgcccacttccaaatccacatccagggcccacccagccctcatccaccccacaggggacccagccggaaaggaactggcactggctctcacgtccgctatgaaggacccacgtcggggagagcagcctctgcaccccagcagaggaaatggggccccacacaccctggggaaggtcactggcccctcaaggcagggccacatcaggaagaaagtgtcggcgccagtggagacctctgaaacgacctccgaaaggttcttccagaaaagagccgagaccgagaccctctctcacccctaccctacagaatcaggccggttccctttccccgtgaagaggcggcgaggggctcggggcttgtctgaggtcacaccaggagcagcagcagagccagggtccgggccacctgagccctggccacagcagcccccactctggcaggggcccagcccactgggggctgcccttggagcacctgcaaatgtgaggtggccttgtccaagcagcccgtcatggttgggaccagggatgtccaaggggtacccgaagactctgaccagctccgagcgtcccaacctctgccctgctgtgctgccaggaagctctgggcacaccccagatagggcaccccatcacagggcagccggcggggatggagccaggaggacggagctccactccgaagctccagcaggggtggatggccggggcaaggctgtgccagcgctgactggggggctgccagtgctgctcccctctccatgcagactagtgccccccaccatttgatcccccagcagtcctaagggccccacactttctacagatgagtctgagtaactgccccaggccacagagcagagattcaaagccggggccttctctcaaagccatactggtggggatttttgttgttttaacagggtcttgctctgtcacccaggctccccttgctctgtcttgctctgtgacacaatgtgtcacattgtgcagtgtcacaatctgggctcactccagcctccacctcctgggctcctcccacctcaggctcctgactagctgggaccacagacgtgagccaccacacctcgctagtttttgtatttttggtacagatgggctttcaccatctctggccaggctggtctcgaactcctaggctcaaacaacctgccgacctcggcctcccaaagtgctgggcttacaggcctgagccaactcgcccggcctttaaaaaaaaattgtggtaaaatacacgtaacataaaatgtatctccttggccttttccgggtgcacagttcatgggcgctgggcacattcggtgtctagcagccatctcctccctctatctccagaactctccaccttctctggctgacgtctgttcccatgcgacacaaacccctgtcccctccccagccctggcactctgcccttccatgtgtgagcccaggcctgcggcagcaccacctcaggctgatggggcaatgctcatgaccccctgttgcagatggggaaactgagtcaaggggggcctaatggttaattctggtgatgagtccagccgtccgtccctggacttggaagcctggggcctcctcagatctgccttcctcagccaactctagatatctcctctccaggccgcgccggccaccgtcccctcccacccagaaggcacacccgggctggtagcacccgcacactcaggggaactgcagggctgttttgcctccacactcatttgcgcaatccagcttcccggacccctgtgacgctccaagaagacgaggaggcaaaagccggcagttcaccaacaggaaacacagaactgtctggtgctagcaagacggccgtgtcgccaatcaaagaagcgcaaatggaaacaagagactgtcctcatccttccccctggcacagattaaaacgcctgataacaggaggtgccagccagggtgttgggaacaggcccagcggctggcaggagtgaggagtcgcacagacaagatacttctgtggagggcaggttggcaggcccggccagagccctgaggaaacctggcccctcccctctcagaatcttccaggaattcgcccgatggctggagtgagaagcctgtggtgctgaagtgtgcagtgaattaggaaaacctgaaaatgcttaaatagccaccagtagaaagagggaaagtaaattagggtccatttcacagacagctggggcgcggggaaagaacaggacaggtccacactcatctcctgtgaaggacatgtgtatgatttctagcagcagccaagacacacctgcaattccaaagctagctgcctgcaggaggctcgggccacatctgaaagggacattggttccctctggtagtgacattggccagttccatcttttatttacttttttatttttgagacagggtctcactctgtcacccagactggagtgcagtggtgtgatctcagctcactgcaacctctgcctcccgggttcaagcaattctcctgcctcagcctcctgagtagctgggattacaggtgcctgccaccaggcctggctagtttttgtatttttagtagagacggggtttcaccatgttggccaggctggtctcgaactcctgacctcaggtgatcctcccacctcggcctcccaaagtgctgggattacaggtgtgagccaccgcgcccggccagctagtttcttagtgttaacaactgcatcttggtgatgtaagatgttaacaagggaggaaactggtgagggccacatggggtcccccgtaatatctttgcaacttctctgtaaatctgaaattattaaaaaataagatcttcatttattttttattttttttgagacggagtcttgctgtcacctaggctggagtgcagtggcgagatctcagctcactgccatttccacctcccggcaagcgattctcctgcctcagcctagcaagtagttgggactactggtgtgcgccaccacacccggctaatttttgtatttttagtagagacggggtttcaccatgtcggccaggctggtctcaaactcctgacctcatgatccgcccgcctcggcctcccaaagtgctgggatgacaggaaggagccagcgcgccgagccctcctctgttttgattgtggtataacacgcaccacctaaacaatataattgtacccatttctcagcacacggttccgtggcactcggcgcattcactgccgtgtggccagcaccaccctctagctccaaaacttttccttttttttttttttttaatctaagctgcttaggggttggatcgtgcactgatacttctctcagctgtgaaagacacggggtacaaacccccgcccagcaggcggtgctgagcaggcgctgtgtcccgccgcccaccaccggcccctggtcctcaggccagacagatggacggacggaggctgccccaggccagcgggaggctgtggctctctagaactctgcagcccacagtgtggctgggggagaaaggtataccctgggggtggaagaaagtcgaagttgatgtcctcaaggggacaaagggccatctgcaccagccacgtgaggccaccgcacttcccccgcggtgtcccgtacatagttcagagctttctgaaagctggtgggaaagtctagactcactttacaagcggttcctggatgggcgggtggctcacgcctgtaatcccaggactttgggaggccaaggcgggcagatcacctgaggtcaggagttcaagaccagcctggccaccatggtgaaatcccgtctctattaacaatacaaaaatcagccagacgtggtggcagctgcctgtaatcccagctactcgggaggctgaggcgggagaatcacccgaaccagggaggaggaggttgcgttgagccgagatggtgccattgtactccagcctgggtgacagagcaagacttcatctcacacacacaaaaaaagtgtttcctcagagaggaagggactgaactaagccctgcagaggctcctgcggccgaggacacccccgggaacccaagcagagaaaaatcgccttctaagcacagaggccccctgcacctcctgtgtgcaaagcctcgagacaagggctctacatgagtcacctccttttgttctgacagtaaccccccagggtaggtacgatcataacccccctcttcagatgaggaatgcgaggttcaaggttcagcaaagttaagtgacttccccaaggccacacagcagggaagccagaacaggcctgagcccccctcggaaccctgcttcggagctggcagagtcgtgctggggcggcgcgggcccccagtaggactctaggagctcatcctgaggctccctccctcccccgggctccgcagtcccctcaacccctcagcagggctgggagcttgctccggcctcccccagcaggaagctcagagcagccactgtccccaggcttcccccaccagcttgcccagcccagtccctgtcctgtgccaaacaccctgcctcactcaaactcccctcccaccaaccacaggcggacgaggggctgccctgtcctttcctcaaagcctggggcaggtgtcgctgtgccagaccaggacacagtcacacggaccccaaatccaggtcctggactccttgcctccccggggagcaggggcaaagccaaggttgccggaagcctggagctcagggagccctgctggccactgccaggcgggtgacttgtgccagctttgcccagcaaggcaggaggcccagggagcagcccagcgcccaaaactaagtgaggctgagcccagactgggcccttctggtggcatcggagcagtgggctcctgctgagggaaagcccaggtgctgcctcagtctttttcaggagccctcagactggagt

SEQ ID NO: 74 - DNA, 42248 bp, Homo sapiens
aaataatggaaacccctccacccgcctgcacagaaccctctgtgcagcagaacgagactgggagctggagtgcatggcccgctcttggccacaggggcccaactctcctcagcctcagggccctggagaggccccaccctccctgggtctggcttgagagcccacctggccaaagggaaacctcgcacccccacgcgctcctggcccctggaatatcttggtgactaagaagggaaaggactgcatttctctctcctctgctgcacgaatccccattgggagagagagtgttgaagaggacactcaggtccctaggcggagctcctgccacaccccaagtatggacagctccaggacacagagctgcaggtggggacctccccctgctctggaaatcagccagggagcactgggcagtgcggtttgaggctctgtacccctggcccccacagctcagccacagcaccctctagcttgggggactagtccagggccaaaatgggataacccttccccatataagcagtaggatggcgtcccccctggtggagagaggaaggaggcctagagggtgtggggcagcttcgaagcgcggggagccgggggtctccaagcaccttctcctggacatgccagccttgaatgggggatgtgcagggcttcaaacccacctggcaggagccctgtggcagggcagagggaccctgctccaaattctctgttggctgcgcttttgtatccaatgcttttcagagtgtattcactcacccacagaaatagagccctgtgctttaggggtgactgtcatatgccttattcttaataaaatctctgaaaaacacgtgagtccaatctcttgcattgggcactcggccccaccacacctcggttcttgcaggtgtgggaagagcatgtggatgagccaggaggtggttcagggtcagccagggggtacgatgagaccaggagctgagactctggggtcccctcagtagataacccctcagatgggccgggcgtggtggctcacgcctgccattccagcactttgggaggccgaggtgggcaggtcacttgaggtcaggagttcaaggccagcctagccaacatagtgaaaccccatctctatctaaaaatacaaaaattagccaggcgtggtggcgcgtgcctgtaatcccagctactcaggaggctgaggcaggagaatcccttgaacccaggaggcagaggatccagtgagctgagatcgcaccagtgtattccagcctgggtgacagagtgagactatctcaaaaaaaaaaaaaaaaagctgttcctcagatcaagtataaggcacccatctgaggtgtcctcaccctcagccaagccctgcccctctctccatgccaccccaatccaaatgaagaaacagaatcttagatcacaggctcctgactagagtggagaggagaagattggaagggtccagtgcctggaattgcccactgtcctttcccagaaggaatcctgggttctggcatctttggccatgctggtgccctgccccccacctgatccagctgcaagaagccccgcatcccggcaggagccctattcttatcctccactaaagagggttatcctgggactgcagctttaggagctcagcgcagccagcaccatgagaactcaagctggtacattttcaatgcaggtctatgttggggatgactcagagaaaaaggcagcagctctgtgttctaaggacacgggggaccaaaaccaaaaccaaaaaaagtggctttgcttgcaaccctcctgaaggaaggacgcatctcttccttcctcctaaaggaaggacccaggtggaaggacccatctcttccttctggggaactgctctgcacccatctcagtccatgtgtggggagggcggactccacccatgtggcccaggcgtggcaggtcacagtgatcgggcggaagaagacatgcaactccatctgagccaacaagagtcaatcttgggccttttgctggagacattcattcagcacctcatgttaggtgccgtttggttcagcagtgaacaaagcatgactatggagaaggacaaactcttgggtggctaaaatggcacccaagaaatctggcaggtcatttgccactacaaggggtaaagctgcctgagtataaagctaccacaagagaaacagaatggctgggcgcggtggctcacgtctgtaatcccagcactttgggaggccgaggcgggcggatcacgaagtccggagttcgagaccagcctacccaacgtggtaaaaccccatctttacaaaaagcacacaaaaaaaagccgggcattgtggtgggcacctgtaatcccagctactcgggaggctgaggcaggagaatcctttgaacctgggaggcagaggttgcagtgagccgagatcatgccattgcactccagcctgggcgacagggcgagactccgttccaaaaaaaaaaaaaaagagagagaaacagaacaaagagatatggagacaattccagataatcaagtcacttggatccagccatgcccgaagctcacagactcctacccttttctgttacatggatcaataaatcccctccccctcccaaacttaggtgtggaatttttttttgtttctgttggttttgtttttgagatggagtttcactcttgttgcccaggctagagtgcaatggcacgatctcaactcactgcaacctctgcctgccgggttcaagggattctcctgcctcagcctcctgagtagctgggattacaggcatgcaccaccacgcccggctaattttgtatttttagtagagatggggtttcactatgttgatcagactggtcttgaactcccgacttcaggtgacccgcccccttggtttccaaaagtgctgggatatgagtcaccactcccggctgtttgttttttttagagacaaggtctcactgtgttgctcaggctggacttgaactctggtgctcaaggggatccttccacctcagccttctgagcagctgaagagtacaggcctagctaacaacacacacacacatgtatatgtatactcaaaatatatatatattgacacagtcttgttctattgcccaggctgaaatgcagtggccacgtggaaaataacacacctggccagttttttcctactttttattttgaactcagtttcttgcttaagcctctagactcaggtttgggcccaggatgggctgggaccaggacctgcagcaagcccaggcagcctggcccaggcctcttcttgttcttagccttttatctcctggggcaattagggaaccgaaggcccagccttggataaacatctgcccaagactcttgagtctcatgtacaatttcagaaaacgagaaaagaaagggagtggggcgcagtggctcatgcctgtaatcccagcactctggggggccaaggcaggcggatcacttgaggccaggagtttgagactagcctggccaacatggtaaaaccccatctctactaaaactacaaaaattagctcggcatggtggcacaaccctgtaattccagctactctggaggctgaggcaggacaatcgcttgaatctgggaggcagaggctgcagtgagccggggtcatgccactgcactccagcctgggcaagagagtgagactctgtcccaaaaaagaaaagaaaaagaaagagaagtgtggggagggcagggcacaggcattagagttccccagacagacagacccctggggatgcttgactaagcccatcccagagtcacagttcagggtggagatatggaatgtcaaaaccagataactgttttgtttgtttgtttgagatggagtctcgctctgtcacccaagctggagtgcagtggcaccatctcggctcactgcaagctctgcctcctgggttcacgccattcttctgcctcagcctcccaagtagctgggactacaggcacctgccaccacacccggctaattttttgtatttttagtagagaaggggtttcaccgtgttagccaggatagtctcgatctcctgacttcatgatccgcccgcctcagcctcccacagtgctgggattacaggcgtgagccaccgcccggctgtttttttttgagagggagtctcactgtcacccaggctggagtgcagcagcgcaatctcggctcactgcaacctcctccttccgggctccagtgatcctcccacctcagcctcccgagtagctgggattgtaggtgtacaccacccatgcccagcagatttttttttttttttttttttgtattttagtagagccaggatttcaccatgttggccaggctggtctcgaacctctgacctcaagtgatctgcccacctgggtctccccaagtgctgggattacaggcgagagccactgcgcccagcctcagataactcttaaagatcatctgtgcaaccccttcattttacacatggggaaactgaagctcagggcatcttgctggcggttaccccttccttcctggcagttctgcccatgcagttttggggttgagggaggtggagaacttcctttctaggggttcccagagattggccagggaagtaggggactctgtgccgcagtcgaagggatttgggttcccacatcacctctccagccccctagggaactgtgcaaaggagggggaagtaggaatgtaggaatggcctgctgagtgggtgtatccatgataacagtaattagggaggtgggaggctttgagcgggctaattatgcaggctgggtctcagactagataaccctcctccttatctttatgcagggacccaaaagataggaaaactgcagtgctcaggagtgccatgaggtagccctaaggacgcctgctgtgcaacaggaccctgcgagggaaaggggaagggatccaccaaagataaactgcagattattttatttgtttgtttttgttttttgaggcggagtcttgctctgtcacctaggctagagtgcagtggcatgatcttggctcactgcaacctccgcctcctgggttcaagtgattctcctccctcagctcccaagtagctgggattacaggcacccgccacctcaccaggttaatttttgtagttttagtagagacagggttttgccatgttgtccaggctggtcttgaactcctgacctcaggtgatccacctgccttggcccccaaagtgctggtattacaggcgtgagccactgcgcccggccttaaactgcagattctaaagctgctgggactggttcgtcactaggcccatggacaaactggtcaccgatccccatgctgaccggtaggcacttacggacgctcactgaccctgaggaggatagggagaggtgcctccgcttggcatcctccgtgggctcaggctggtgggtctcagtcaggcattatggaaatgatctgaagttctagacacaaaggtcaaagcatacagtacacaaaaggagtgtctgaaaggaaagccaactgttataaataatgggggactcagccaggcacagtggctcacgcctgtaatcccagcactttgggaggccaaggcggcagaccacctgaggtcgggtgttcgagaccagcctgaccgacatagagaaaccatctctactaaacccatctctactaaaaccctactaaactctactaaaaccctactaaaacccatctctactaaaaatacaaaatttgccaggcctggtggcgcatgcctgtaatcccagctactggggaggctgaggcaggagaattgcttgaacctgggaggcagaggttgtggtcagccaagattgagccattgcactccagcctgggcaacaagagcaaaactccgtctcaaaaaataaataaataaataaataatggggggctcaaaggtgaaaccccaggctgccagcaatgctgcccccccacatcctgtggagccctcagggcctggcaccttctacactgaaatcattcactcagtcaacaaatgtgcattaagtggggtatggtcgtgtgcacctgtaatcccagctactcagggaactgagacgggagggtcacttgagcccataagttggaggcttccgtgagccgtgatcatgccactgcactccagcctgggcaacagaatgagaccctgtctctaaaaataaaattaaaaataaataaatgtgcattaaacacctaccatgcattgggctctggaaagatgctgggaacacccagataaataagttatggttcttgccttcaagaagtccccaggtcggccaggcgcggtggctcatgcctgtaatcccagcactttgggaggccaaggcgggcggatcacgaggtcagaagttcgaggccagcctgaccaacatggtgaaaccccatctctactaaaaatacaaaaatgagccgggcatggtgacgcatgcctgtaatcccaactacttgggaggctgaggcagggaatcacttgaatccgggaggtagaggttgcaatgagctgagatcacgtcactgcactccagcctgggcgacagagcaagactccatatcaaaaaaaaataaaaaataacaaagtccccgggtctagcagctggactcctcacccaagacccagacatcccagtatggccaagagggtctcaatttatgcctattgcccctgtgtcattattaataggttccacttgcactctcaaaagtgttctggttttaatgataaactatgcgatcaccttaaccatagcacattgttataggcaatggtggaaatagctggggaaaatgggagtatgtgctgttaagactatgatggaggccgggtgcggtggctcacgcctgtaatcccagcactatgggaggccaaggtgggcaggtcacctgaggtcaggagttcaagaccagcctggccaacatggtgaaaccccctctctactaaaaatacaaaaattagtcgggcatggtggcgggcgcctgtagtcccagctacaagggaggctgaggcaggagaatcgcttgaacccgggaggcggggttgcaatgagctgagatcttgccactgttctccaacgtgagctacacagcgagatgctgtcccaaaaaaagactatgatgaaaagactttggtggaagctgtgtgaaagcaagaatcagtctgcttaatgtgtggtcagaggtcagaccaccagactatggagaatgtgatcagaggatgatttttttttcttttcttttctttctttgctttctttttttttttgagacagggtcttgctctgtcgcccaggctggagtgcagtggcgagatcctgcagcctcaacctcttgggctcaagtgatcctcctacctcagcctcctgagtagcagggactataggcgcacaccaccacacccagctaatttttgtattttttgtagagatgaggttttgccatattgcccaggctggtgtccaactcctgagctcatacaatctgctctcctcggcctctcaaagtgttggcattacaggcgtgagccgccgcactcggctggatgatgctttttatacgtgtctgtttctctaaccccaggcttgctgctcttccccaacccccagggttaaaactgagcttcctattatgagtagcattagcaacatgcacgggcttccaacttcagctgcactgggccactaggcacaattctcaaaaaccctggagtttcatgaatacaaactaagtacccatcagtcaggtgaccggctaaaagaattatggtacaaccaaacaatacaacattatccagcgtaaatggaatgagaacacctactgaaagcgtgtaaaaaaaaaatcagagtgaagaatagcaggtacaattttctgcacatttgtgtaacaaaagaggaacgagtgtgtgtatacacatacgtatatacacacgcacacataagtatgtatgtgtatatatacacacatatatacacacttttatatatattgattataaatatatatattttatatatacacttatatatatacacactatatacacacactatatatatacacactatatatacacactatatatatatacacacactatatatatatatgcacactttttttttctttttttgagacggagtttctctcttgttgcccaagctggagtgcaatggcgcgatctcggctcaccgcaacctccacctcctgggttcaagcgattcttctgcctcagccacccgagtagctgggactacaggcgcacaccaccatgcgcagctaatttttgtatttttagtagagacggggtttcaccatcttggccaggctggtctctaattcctgacctcgtgatccgcccgcctctgcctcccaaagtgctggaattacaggcgtgagccaccgcgcccggctttttttttttttttttttttgagacggtgtctgtgtcacccaggcaggagtgcagtggtgcgatcatagctcactgcagcttggaactcctgggctcaatctgagccgtcctgagtgatactcccagctcagctcccaagtagctgggactacaggcgcgtgccactacacctggctttttttaaacaatattttttgtagagacgggggttttgaaatgttgcccaggttggtctcaaacttccgaatcctgaactcaagtcatccgcctggcttcggcctcccaaagtgctaggattacaggcgtgagccgctgcaccgcccggccgagaagaatcttaccagttctcatcttccttcctcccgtttaaatgctcacatcaagtcgctggctttcctcaccacgtgctctccagaacaaggtcggctttccttcgcaatttgtgcgaggccctacctagggccctcccagcccacctcgggaagctgaagctttccagttctcattagagcttgacaaacgctccgaaggttataggcctcgggtgcttcccaaaggccccctgcggcctggccaggaaagacccaccggcgctctctgcctggagcacttcaactcactgcaagacctggtcccaatgtcccctctgcagcattctctgacctcaccgttccgtccccgccaagcccctgccaagtgaaaaatacgagttaaagcgtcctggctgtggatggagtcagacccggctctaccccttgctctctgtgtgaccttggtctcggcctcctccactgtaaaatgaggacaccagcctggaggtgaggacccatgggtcgaggacgcgggtagggagcccgttctggctcggggcaaagtttggcgggtccattctgactcttgatccccattagccacgtctcgccctcgcctctcgtgcccgtgccctaagcgaccctccactccctcaataatccagccgcacccattcggcgggaaagggcctgccgggtggggagggcgctgagggtcacgcgaacaccgcagatgacagactgcgcggtcatttagcaaatctgcaagagaaaacaggggatccttggagaggggaggattagccatggcagaaccagaccagtctccacccaaggtcacagtgcccgcccgacgggcagcgagcagcagggagtctccccgaggccccgccccgcgagggcgcccagcctccctgggccttgagtcagagtgcgttgcctttaagacgttctggaaagtcaccgcgtccgtgggcggggaaccaggcgcggcgcgttttgtccctcgcgggccgccgtgggctgggccgggcgcgagggtggggcagggaaacggcggcggggtcaaaggccacggcgcgcaccacgtgggccggtgactccgtccttccctcagcagccgcggcgcgcagggcacttgggttagtggcgcggcgggcggcgcggacagccgaggcggacgcccgctcccgccaccatggttatcaagacggacgagttgccggcggccgccccggccgacagcgcccgggaacacggctcgcaggccgggggcaaggggcggccgggcgcggccggtgagcggggccagggccagcgggccgctgggcggggggcgccggaccagggcgggcgggttcgggactccgcggggatcgccgccttccctccgcgtcgggcccggttgtatctcgctggggccttcaccgggtcgcccccgcgctgaaggtcaccttcacagtcgcccccggctgcggcccgggtttcgcacgtgcggtcccgtggagggcagcctcggctggcaccctcggcgggcacacgcgcgcctcatcgcggggacacgtgcgcgcacacgcggtttcggggtgcgccgccgccgcagaccgaaagaatcggcggccccaccccctctgcgcccgagcatgggagctctctgagctggggtcgctccgacgtttgcgggacagcccccttcggcacctgctccgcggcggcctcccaggcattccctgtgcgcagggctgcagccctgggagtgaagctccgctcgaggcttcccaggcttggtttgtgggaagagcacgaggtgcggggtgtgcgttgtgaggggcgtccctggttcatgccctgaggccaggctataaccgcaggtcttcaggctgtggcggagactctcaggtgtgttggcctgctcggccgacctggtgtagggggcgtctgcctttgcatggggcagagccaaactccttggcagggggaagtgtttgtgccagaacttgatcattaacctgccttattgcgaaaagtgggtcagaccagagttgctgtttttaaggcaaaggtcgttagtgtggagtcaagctcccagcgatcccccatgggggctgtatggtggtgactgtggcagtggctgcagcttgtctcgggtggggcctgctttccctttctcctgagccccttctcttccttctgttccctccaccgtgtctcagactccagccttggggctggaatccccttcccaggccctcagtcgtcatcttcctcaggccctctttgctctgggtggcagtggaggtgcagagctactcctgtcccccagtccctccctcctccgtcgactgtcctcagttgggacttgtggtcttaacgcctcatcatctcccttcccagcttcagtgagtgcgccagggctgacttgggaatcaggatggggacagcgttcagccctctgaccctgttcccatcatagcggagttgccttggggtgagggacaggtgctggggcagtactgctgattgtctagacaaggccaaggtttgggcagaagagcagatgctcatcgccccaacctaccaggctttgtgctgatgtggctctgaatcagtgggggcaggctggatgagaggaggttggctgatttcccctctagcagagacccgaagagtcgaagtgacttgcccaaggtcacacagcgatttagctgttaagggaagtgtttggattccagctcatggccagcaagccaaggctgccgtggcctggcccagaggaagctgggacaggcgtgttggtttggatcccgtgctgagaactagggggctgacgagcgtctgttggaggatttctgtgagggagtcagtgaagccccttcctaactctgctgggggtgggggggctctgtcgggggtaaactgagtcagggaagggcacagctatttgttttggggaaactgggagcatactcgtgggcaggacatgggctcctacgtccctgggaaggtagtacagctagctaggacttacgttacagccagcccggatctattgaaagaaggaaggagccttaatgaagaccccccagctggggcccacctgagcatcagaaccaaggcttctgacctctgagatccagctctggaaggctcttcagcccccttaggaaggagctgatctaggccattgagggtcgggggcaagggttggttaccttcctgggaatacagcggcttttaggggttaagagaacaggcaggtttttcaggtccacagtggtgcgtcaggttccttctgcccaggggagggctccctggagttgaggcccagagggggaggaggaggaggctggcagctggggaaggagtctaggggcttatgggagctccgcaacaggatcttggatgggatgtggggagagcagcctgaggaactctgaactgtcctcaggccctgaacgcctgcctctggcctgggtgggacaggaaggaggcaaacaggtgcctggtctgtaggttcttccataggccgcctgcccgccccattgcctttccctgaagccctgggctcccgggacgggtgatgcaccttttcggaccctacttcctgctggagcctcacttgctgaggccttggctggggcgtggcctggccctggcacagtcttctgagtgagattgtgcctggcttgggcagcacacaggtcctctgggaggcctaagtttcttttctagttcctcctctctgccgcctttgggctcccggcgcctccaggccggggcaagggtgtgctttgtctcttcactagcatctgagtttgcgtgtatgcagagtgctgttggggcacggctctcccgctctgcagaagacctccttttcccctcccctaaagctcacatcctcagaggtgctcctggactatgagaggagggagtattggcccaagggtgtagaggccttggggagtgctgtgactgggatagttctgccccccccccccgagtagaggctgaggcctggacgaggaggcaggtgcagcctacctgtgggtgctgccgggcccctcgggagggggtgggtgggctgcgctgagtgggagtgggtcagtgggagcgggtccatgggagcgggtcggcgggagcaggtcggtgggagcgggtgggtagcccgcgctcagtgggagtgactcaaaagccatgggcttgggcgtctgacactcctgttttttctttccttttttttttaaacttaatcccaaatgtgatagtaacacctggttttttcttgctctgggttggctcctcttgcctctgtgaccttgggcagctgcttcctagccttctggagcctcagtttcctcaggtgagatgggctggcacggcggtttagggagctgccgtgggctgggcctagcgtgagtcctggctctgtggtaatcagagtgcaggtggttgtcaacacttctctggggtcactgccaggctgccctgccccacccctctctccggagggttagggtgtatttcaggagagggtaggagcagaggggctctgtctaggcctggtccttctcctctggtcattgtgtgagacccagaaccttccatgggggctgtgaagcagcccagggtctgcctgatccctggtcctggaggggaggggatggagtgagagcctggctcccgcccaccctgggtagggtggatgctggggcagcccttactgggcactggcagcatgtcagaggccctgggaaggcgccctggccagctgggcacctcctcccccgccgtgcggccactggcctcttgctgccagctctgttctcccctgggagagacttggttccctcctggcagagccggggctgctgggaagggaagatggagcctgccagcttcttgatggagcctggaggccaggggcacgggtgcagttgtcctctgggaagctgggggcccatccccctcccttccaccagaaccagtgactcccaggaaggggctggcagccaggtcacctgcagggggcagcaggagccagaggtcccagccaggcccttggcccagggacagtggggtgctcagtgtctgggactggtgggcagaggcagccaccttatggcctggacccgggtctgtgccagctgttggcggcagctggcagaagcggtcctgttcacccccactgggatgggagcggaggagaggacccccttgctgggccctgcccctgccagccagtctcctaggccctcaatcttgaggggtccaggtaccccaaattctgggttctccgatccccctagcggctttgccggcagtgaccccctctctagggggcatagggaggtgggcctgagtgctgatagcagctccccctggggtcctggggccaccgggttctcctggcccacagccgtccttctggccgaccttgagcgggatgccaggcagggggagtgtgcccttcctggggctgccatggcaggcctggccccactgaaacccgaagccagccggagctccagccccgggccgactggctgcattagggcaagggtagcggcagaggctggaacaaggaacccgggcaatgctggggctgagctggagagctggctgccttgctgccacggccatcctgagactccagagccgaggggagggcagctgccaactgcaccaggtgagcaccgggacctggtgagccagccagctgcctgcgggggagatcgctcagccttcatccaggggtggggagaccttcggggttcctaggaggaaggattagggtaaaacatgctgtcctggggagaggaggccccttgggagccagctgcattcctttgaaacgggatagggaataggtaccccctgagggtcgtctccctgggctggggaaggagagtgggagccgcggccaccttgccttgtcgtccctcctttctgtcctcccattccagacatgcgaaagaacacaggctgtctctgtctaggtatttgactccccacttttgggatctcatagctcaaaactgctgttctatattgggtgggggcccttcctgcttctccccttattccaggggcttggcagccagcacagcctttctcagggaccctgtgggggcagttcctccacctggctgccctgcctcttgctgtttgcaagctgaccgaccaccgccccggctgtctttctgctctgtcactagagtcaggcaggtgtgtggggctgctcacgtgcgaggggattgggggtgcccttcctggggcggttggatcctggaagggaggtctttgtacatcctcgtggttcctgggagtccactgcaggcttggagagggtggggtggagagccatgacatgcacagttactgaaggtcctcagtggccagagttgagggagtgccgcggcgtagggtgcgggctgcaggagggagtctggggcccattctgacttggttgaccttaggccaggctccgagcctttctgggcttcaaatacccctctttggggtaagggggaagagactctgagctcttagaggtcctgtttctcgtttgctcgtggggatccagggaaagggagcgactctctccaggccccccggtctctgcctttccgtactggcctcatcccttccctgaggctcctgctccgtgtttctggtgggtccggattgggaccacacagttctgggaaaggcacctgtccccgctcctgagagccgggtggggaaggggaggtggggtctagatgggatgggcagagctgggcgagctcttctttctggaagggaacccaggcactcctcagagttgggaccgttgaacttcaagccaagccaggcaggtgagcctggcccatggacagatcctgggggccaaggtcctcatctcctagatgggtgcccaggcaggcccgtgtctgctggagggttactgagaggcgatccttggctcctcagcggaacagggggttctcctttgttccactggtgcctgggtaggaatgcaaggttttgtcacctgctccccaccctggagcatgtggattgggtgctgtcttcaaatattggatgtagctagaggtttgcagtaagtactttatttgttgccttttttgttgagcctgggcaagatagaaggtggtgggtagagctgctggtgaggacgccaccctgggtgcagccgaatgtctctgggaatgaaagggggagggagtgtgattctgccattaagggtcatttgggcaggctgtggaaaaggtttatttctcctaggccttgaagggtgagtcagtgtttgctgtacagaatgggatgtcaggggcagcacagacacagaagcacagcggtgggagggcggtgggagggctgtgggcggtaccaggcttgcatggtgtggtgtccttagacctcagcagggagcaggcaggagctgaggctgacttcaggtgggtgcctgagagcgctggcctgagaagcttggtcttgtaagcagtgggcttcctaggagggttgcaggtggcactgctgaaatagaggaaatgcctgccctagggcagtggctgcagaggccgggtcccgtgggtgggttgggagatttagggtgggtgactagatagagcaggtgccagtttgaggaggaagatgagttctgtccctgcaagacgaggcttcagtgatgcctcagggacagccacatgttgatgcctgggaggcagcggtctccttggtccaaaaggctggagagaggacaggattggccgtgtgagccacggggcaggagtgtatgggagggggtggggtcagaaacaggagaggctgggcctaggcactcccctgcagcccccctgcagcccaggaccacagctcaggagggatggaagaggatggagctggagagggaggggcaagggcactgtgtggggtcagagaagaggagaggaagaggggaactgctgctgggaagctaggtgtgttagggccggaggagaccctcgggcttggcttgaagggtggctttggtgaccctggggagagtggtttgggacatgggttcaggtgcaagccataccacagtgggccagggaacagtggctgggaggggcggctgggtgtggaagtggcctgcaggtgcacggagggcgaggcgcgaccgtgaggctgggactctcgagggcatgcagatgcctttccagaaggcacgtgtccccgtgtggggtcaggcggacagccccgccgaccagcgaggctgcctgattctgacccgttcttgtcacccgcagagctgccatcagtcatgctcttaaacggggactgcccagagagcctgaagaaggaggcggcggcggccgagccacccagggaaaatgggcttgacgaggccggcccgggagatgagaccaccggccaggaagtcattgtcattcaggacacgggcttttctgtgaagatcctcgcccctgggatcgagcccttctccctgcaggtaagatggaggaacgggtgctgggggccaggcctgagcctgctggggagggtgagctggaaagctcagccttgctcgtgctcctaccggccccattttgtggcaggaaactgaggatcccgtgccctccctagagtcactcagctagcgtggtggacgtgggaatcgagcccagggtcaggtcgttgccccattgctagaggacagcaaccagctgggcctgccagccctatgtggggaggggagtgatagtggctgggaagtgttggcatcccaggactccccagcctcttgctctgtgccctcaggcaagtcacctctctctgggccgtgattttaccatctgccagaggggagggtagtattgggttatctccaagggcagagccagcgtggaggtcttgcaagccggtgactcagtggggaacgagacagggtcgtcgtatgtctcggcacccgcaggcttgggccccagagcaccccttctggaaggggaaagccatttgccccaggcaccttagcactgggcaaggccgggggcgagcctgccgtcttctgtcccgctgttcttcatctcccttctctgctcgggcattgctctgggtctgcaggccgagtcggtgggccaggctccaggctgcacacacagggcatggcatgtgtggacatggcctggatttaaaagccagaaagtgggatagccgatattcgagtatttggggcatttattctggggaccaaggtactttgggctggggacaaggggatattgtccttgctgtccgctacgtggcctctcaccggggcggttggggccttctctccccgctacgtgctctctcaccggggtgggcggggccttctccctgcaggtgtccccccaggagatggtgcaggagattcaccaggtgctcatggaccgggaggacacgtgtcaccgcacctgcttctcactgcacctggatggcaacgtgctggaccacttctcggagctgcgcagcgtcgaggggctgcaggagggctctgtgctgcgtgtggtggaaggttggtctggaagttggacagcctgcccgggggagggcccacggaggcagaggcaggcagcaccatccatgccagggtccctgtgtcacggatgagctcatggaggcaggattggagcacagatctgcttctcaggccagcacacctatatctgccaacttcacggcccatgggttaaagaacagagccgtgggctgggcatggtggctcacgcctgtaatcccaacactttgggaggccaaggcgtgtggatcacctgaggtcaggagttggagacttgcctggccaacatggtgaaaccccatctctactaaaaatacaaaaagttagctgcgcgtggtggcaggtgcctgtaatcccagctactcgggaggctgaggcaggagaatcacttgaacctgggaggcagaggttgcagtgtgcccggatcgtgccactgcactccagcatgggcaacaagaacgaaactccgtctcaaaaaaaaaaacaaaacaaaagaacagagccgtgattctaaaaaaaaaaaatcaggcagtaccatcccagggcgtgaagtcagcgcagttcagttctgtagagatccatgagaagtcccaaacgtttcctagccctagagtggggaggtcgggcacggggaggtgccatccggttggtctgtggcctcgagttttctgggtagaagctgcttgggttccaccccagggcctgtccgcctgttgagagcagtgacggaaaaggtctgtagctcaacagcgcccacagttgatcacggaacctctcccctccaccaaaagaactgccattaaaatcccatgaaaccacataggggcagtgttgacattgggggccttggaaagtcctcaggccacccctacatgaggctgcctcgggagagcagggcaaggctgtggtgtggaagtcccacagctccaaaagccctgcccagccgacacactggcgcacaaaagcaggcagccttgtggacgcctgaggcctgtgtgtgcttcagaggcatttggcagaaagttctttataaacaaagatccctgctcaccagtaggcagagtgtgtgtgtgtgtgtgtttgtggtgtcaaaaccagaactccagcttatgtgttcacagtggaatttgaaaacggaaacctaaagttgaaaattaaaaccactgtgttagcacctccaaaacctgttttgtgctgggcaggttgttcagggtgcagggccctggtaacgccataccctccctgccttcctgacagagccgtacacggtgcgtgaggcccgcatccacgtgcgccatgtccgagacctgctcaagagcctggacccatccgatgccttcaacggggttgactgcaactccttgtccttcctgagtgtcttcaccgacggcgacctgggaggtgcgggaggcactggggccggggattgggccaaagggcggggagcacggaggtggggggctggagaaggggccgaggggcctgggcctgaggcacccggaccacggccatcaggaggtagggagacagctggccctgggtggccctgtgctgaccaccagcctcgggtccctcagacagcgggaagcggaagaagggcttggagatggaccccatcgactgcacaccacccgagtacatcctgccagggagccgggagcggccactgtgtcccctgcagccccaaaaccgtgactggaaggtaggatcctgggggagggaggaagagggtccctggcggggtggaggccccacaccagaggcctggcccctcagactcggccgctcccgaagcccttgcagtgcctgaaagtactcaccatgagcggatggaacccgcccccggggaaccggaagatgcacggggacctcatgtacctgtttgtgatcacagccgaggaccggcaagtcagcatcaccgcgtccacacggggcttttacctgaatcagtgagtccctgccagcccaccacacccccctgccgtgccagccgtcctgggtctgggcagacacctgggcccccgctcagtgcccgccctctccctgcaggtccacagcttatcacttcaaccccaagcccgccagcccccgcttcctaagccattccctagtggagctgctcaaccagatcagcccgaccttcaagaagaacttcgctgtgctgcagaagaaaaggtagtgcctttgtcccctcccgccttgtctcatggcacacgggggcatggggtgagccagcccacctgcactccagtgcttctgtctgaagaaaccgccctgggcccccagtgttggagtccccgctctagggagctgtcggccagtgccgagacagcagccgcaggagaggcgcccgtgcacttccatctggctccagggcagtgtctcagggtgggagatgccggagcaggcgggggcctcagaaaaggggcccgtggaagggctctgagcttggtgggctgccccatctccccctcccctgcctgccacagggtccagcgccacccgttcgagaggatcgccaccccattccaggtgtacagctggacagccccccaggcggagcatgccatggattgcgtgcgtgcagaggacgcctacacctcgaggctgggctatgaggagcacattcctggacaggtgcctgcaacctggccctgccctcgctgggcacccctgccctcctgggtgctgggctggttccgtgcacttccctggaggccccatgcttgacttcatttgggagtctggggctcttctcaggaaggtagaaggagcgacttccgggagcaggtcacagggcacaggctgagctcgtttttccctccctgatctctctgcagacccgagactggaatgaggagctgcagacgacgagggagctgcctcgcaagaacctgcctgagcggctgctccgagaaagggccatattcaaggtgcctgcagcctctgctgaccggcagtctgaggcccgctgtccacctgctgacgggttttctcatggagaggaggaaagcaagggaggcaggggcagccctaaccctgtcaggttccccgaaggccagtcagcgtctcccgcagggtctgctagccttccgcctcccagcagaccatcccagtacctttctctggcctctctgaggctttgagtccctggaaggagcgggccctacttcccatagggactgagtgtccagggccgtgcagcttcccgccctctgtgactgctgcggggcttttgcctgggcgagcactggccggccatggcccttctagggcgggtgctcatttgcataacacttttagtttgctggggtttaaaagttattagtgctgggttactaagagaaatgaggaaaagcagttgcttaagaaaaaaaaaatctcaggccggcttcagtagctcatgcctgtaatcccagcactttgggaggccgaggcgggcggatcacaaggtcaggagttcaagaccagcctggccaatatggggaaaccccatctccactaaaaatacaaaaattagctgggtgtggtggcgcatgcctgtagtcccagctactcgggagtctgagacaggagaattgcttgaacccaataggcggaggttgcagtgagccgaaattgcatcactgcactccagcctgggcgacagaacaagactacgtctcaaaaaaaaaaaaaagaaatctcagccaggcacagtggctcacgcctgtaatcctagcactttgggaggctgagacaggcagatcacttgagcccaggagttggaaaccagcctacgaaacatggtgaaacctcgtctctgcaaaaaatacaaaagattagccaggcatggtggcatgtgcctgtagtcccagctactcgggaggctggagtgggaggatggcctgagccaggggaagtcgaggcttcagtgagctcggatctcgtgccgctgcattccagccttggcaacagcgtgataccctgtctgaaaacaaccaacctcccatagttatactgcctagagatgataattgtagaaacaaaaactcatttctcgggtaccgacttcaccagagatggtgccaagtgcgttatagagactatttcctataatatattggacaacttgtaaaggtcaatacctttatctgttcaagttcacctggcacataactggtggatcccaaacctgcgcacgcttgttaatcactaagccctgctgtctccctcagcacaagtgtattctcaaaacatgggggttttggtttgtttgcgcttttttagaaatggagtctcactctgtcccccaggctggagtgcagtggtgtgatttcggctcactgtaacctccacctcccgggttcaagcaattctcctgcctcagcctgtcgggtggctgggactacaggcgcgcgccacctcgcctggctgattttttttgtatttttattagagatggggtttcaccatattggtcaggctggtctcgaactcgtgacctcaagtggtctgaccgcctcggcccctcaaagtgctgggattacaggtgtgagccaccgcgcccggccaaaacatggttttcttgcccttttctacatatgaggaaactgaggctccgggtccttgggtttccaaggcaggcccggttgcctccgcggtctaggtgcgtgcgcttggccaggtggatgcaggctcttgtgggcgcggcctctaaccctgccctcctcgacccccgccaggtgcacagcgacttcaccgcggcagccaccaggggcgccatggccgtcattgacggcaacgtgatggccatcaaccccagcgaggagaccaagatgcagatgttcatctggaacaacatcttcttcagcctgggcttcgacgtccgagaccactacaaggacttcgggggggacgtggcggcctacgtggcgcccaccaacgacctgaatggcgtccgcacgtacaacgcggtggacgtggaggggctgtacacgctgggcacggtggtggtggattaccgcggctaccgggtcacggcccagtccatcatccccggcatcctggagcgggaccaggagcagagcgtcatctacggctccatcgacttcggcaagaccgtggtgtcacacccgcggtacctggagctgctggagcgcacgagtcggcccctcaagatcctgcggcaccaggtgctcaacgaccgtgacgaggaggtggagctctgctcctcggtcgagtgcaagggcatcattggcaacgacgggcgccactacatcctcgacctgctgcgcaccttccccccggacctcaacttcctgcccgtgcctggcgaggagctgcctgaggaatgcgcccgcgccggcttcccccgcgcccaccggcacaagctctgctgcctgcgccaggagctggtggacgccttcgtggagcacaggtgaggggcggccctgccggaccagggccggggccagctgcagggagtgcgggcgccctgggtggatccggggttgggtccttgaagggagaagcgctggagagtgaagaagggctccgtctagccacagtcattggagacccgtccccacctgccctgctgtcaggctcccgagcgcagaaacccgggctgcagactcgcgagcagccaggcgggtaatgtggctgtggcggacactgttctcttaaggagcacttggaagtctgggtggctgtgactgtccccgtgctggggcgggcaggtggggcaccgggggtccccgccgctggtgtttagtgcttaggaaatggggaaatggccatgtcagaggtcccacagcatgagtaactctcaaatgccagtggcttcctgtcactgttgagagccctgacctggatggggagctcctcttttcccataccctccagaacgcagctgcctttttttttttttttctgagacggagtttcactcttgtcgcctaggctggagtgcaatggcacgatcccggctcaccgcaacctctgcctcccgggttcaagtgattctcctgtctgagcctcccgaatagctggtattacaggcgtgcaccaccacgcccagctaattttttgtatttttagtagagacggggtttctccatggtggtcaggctggtctcgaactcccaacctcaagtgatctgcctgcctcggcctcaaagtgctgggattacaggcgtgagccaccacgcccggccgcctttttcttcctgtcttgggagatcttggtttttctgcgttgactcatgcacaccggccaggaggtgccctatgcctgcggggtgtggagccccagctgccgggagccgtgggccagcagagctcctctccccgatgtccagctcctgctctgccctgtttcctctgctccaggtacctcctctttatgaagctggccgccttgcagctgatgcagcagaacgccagccagctggagaccccctcctccctggaaaatggtggtccttcctccttggagtccaagtctgaggatcctccaggacaggaggcgggaagtgaggaggagggtagcagcgccagcggcctggccaaggtgaaggagctggcagagaccatcgccgcagacgacggcacaggtggggctgctgcagatggccgggagagagcccgggctggccctgccagggtggcttatgacccccacctgggagaggctggcagacatctctgcaaggagctagggggcgaggcttggcgcagcccagctccaccggtggcagaggggacccgtgtctcatggagccatgtctccacagcagaccctcggagccgggaggtgatccgcaacgcgtgcaaggcggtcggctccatcagcagcaccgccttcgacattcgcttcaatcctgacatcttctcaccaggcaggtggtgggggccggccagcgcaggagccctccagggccagagcttcgctggggggcctgggcccttggggctggtgggtttgtcccccatctgagcgcttcccccgccagccccaggcggcatttgtcttgccactgcctggctcagcctctctgctctccctcctccaggggttcgtttccctgagtcctgccaggatgaagttcgggaccagaagcagctgctgaaggacgcggctgccttcctgctctcctgccagatccctggcttggtgagggaggggctgcggggctgggtggggcttgtgtggagggtgctggtccctcatctgtctccgacttggaggcccatgaacacaggctcgcaggagtgactttttcagctttccctgagtgggcatccccgtttgacagatggggagcctgacccccagaggtcaagggcacaggccttgctgagcccaccgtgtgggctggcagctggtaatccagtcttctgagccctggatggtggcatggctgggggacggggccagagctcagtgggggctgcccatcctcctcctcctcccgcaggctctgtgtctggtcccaggatgctgggtgctcccccaacaccgtggcctccaagcctcaggacacggggctgggggtcaagtagtgcccccaagcgggcacctctgcttctcccacatggttagagggggcctgtaccaccaccgggctcttggttcttggcctgcgctcctgccagaggctgggcacattctgacatcctgactgggagctggagccttcggggtccttctccagggcctcccaggatagctgtgctcccccagaaggactcagttgggtggaggcagaggagctgggtgggggcctgagctgctgcagcccgcaggtgaaggactgcatggagcacgcggtcctgcccgtggacggggcaacgctggcagaggtgatgcgccagcggggcatcaacatgcgctacctgggcaaggtgctggagctggtgctgcggagcccggcccgccaccagctggaccacgtctttgtgagtgctgcccggggtggggcggaaccggagctgtggggctgggatggaggccgggggcctgaccaagacctcccttctgaatccttccagaaaatcggcattggagaactcatcacccgctcggccaagcacatcttcaagacgtacttacaggtgccacccgtccgctctgcggctggccatggcctcccagggtggtgtggggcgtcgggaaagagcctgaggtggggctgagggccctcatgactcggatccaacctgcctcgcagggagtcgagctctccggcctctcagccgccatcagccacttcctgaactgcttcctgagctcctacccaaaccccgtggcccacctgcccgccgacgagctggtctccaagaagcggaataagaggaggaaaaaccggcccccgggggctgcagataacacagcctgggctgtcatgaccccccaggagctctggaagaacatctgccaggaggccaagaactactttgacttcgacctcgagtggtgcgtgcggggcaggggcggtggggtgggtgggattgggcagatgaggcggccaccacctgctcccagatggcgtctaaggcctgtggtcataggccagggagtcagagagaagagggagcagctgtggagatcactgggtgctggagggtgagggcagccgggaggctcccgggggccgggtggggcagtgttgggggcccgggctggacagcgttggggagctgggtggggcggtgttgggggggcccggcggtgcttgggctgctcaggccccctgctccctcctcagtgagaccgtggaccaggctgtggagacctacggcctgcagaagataacgctcctgcgggagatctcgctgaaaacagggatccaggtgggcatggctcacagcatccccgctgtgtccccgctgcgtccccgctgcaggctcccactcctggccagggccacaggggaagtggctttttcacggtagccgtctgtgcgcaagcgttggtgggttgggaggtgccaacccgctgaacctgggcctgaggcttcctgtggtgggggggctgccccccaggtcctgctgaaggagtacagcttcgacagtcgccacaagcccgcgttcaccgaggaggacgtgctcaacatcttccccgtggtcaagcacgtcaaccccaaggcctcggatgccttccatttcttccagagcgggcaggccaaagtgcagcagggtgtgtggccaggtggggctgggtggaggtgggggttccccatggcccgtcctgaccttgccacccctgggggtgccctgcaggcttcctgaaggagggctgtgagctcatcaatgaggccctgaacctgtttaacaacgtctacggagccatgcacgtggagacctgcgcctgcctgcgcctcctcgcccgcctccactacatcatgggcgactacgcagaggtaccctctgggctgtggcagcaaaggcctggcctcgtgttgggggatggggagtgagggggcccctgacggaggagtgggtggagtccagggagaccccaggaagtcgctggttctgcccaggccacccctggctccacccctctgtaactgtgtcccgagcgggagagctcaggagcaccctgtgctgcggtgaggtcagttctgggaggcgatggcaggggacccccccacagggcgtcagcaaggacgcctcctgagactccgtgagtgggcaggaagcatgccaccgagctcccacgtcctctgtgcccagtgcaggctgtggggttctgggtgccctgcctggccggggctggtggaggctgtggtggggttctgggtgccctgcctggccagggctgtttcagggttagcatgtcttaggatccctactccctgcaaagggactgttttttcttctgtttataaatgggtgggttgtttgtttgtttgtttgttttttctgagacagggtcttgctttgtcacccaggctggagtgtagtggcgtgatatcgactccctgcagcctcaacctcctgggctcaagcgattctcccacctcagcctcccgagtagctgggattacaggcgtgagccagcacacccagctaatttttgtatttttagtagagatggggtttcatcatgttggccaggatggtctcaaactcctgacctcaagggacccacccctgctcaggcttttttttttttttttttttttgtaacatttttagtagttttaggtttgtatttgggtgtttgtggagattttgttgggtgtaagacatgggtgtgtggagctctctgtggagcgtgacctgcccttcaaggtgtggcagcagctgctgctgatccccctcccccctgctgcactgtgctgggcgcagccggaggggacaggagcctgcagagcggcaccgtgggctgctgggccggggccaggcgggctctgggtgcagtgggggttcccacgccgcggcaaccaccactgtctctccccaggccctgagtaaccagcagaaggcggtgctgatgagcgagcgggtgatgggcaccgagcaccccaacaccatccaggaatacgtgagtcgcgagtgccgcccgcgccgggggatgcgaggggctgggtccgcggccaccctgacctgtctccgccccgcccgcagatgcacctggccctgtactgcttcgccagcagccagctgtccaccgccctgagcctgctgtaccgcgcccgctacctcatgctgctggtgttcggggaagaccaccccgagatggcgctgctggacgtgagtgctggggcgggggggcggcagggacccagctccatcccaggggaccgggagctgaccagggccccccaccgcctgcccccagaacaacatcgggctggtgctgcacggggtgatggagtacgacctgtcgctgcgcttcctggagaacgcgctggccgtcagcaccaagtaccacgggcccaaggccctcaaggtggccctcaggtgaggggccgcccgtccaaacgccaaggccggcggaggcctgcggggcagccggcgggggcggggaagagacccagtgctcctgtcttcctccacccgagaaaatttctctcgacctccccctcttccctgagccctggacttgctgttcccctcggtggcttccagggagggatctacgggagaccccgggcccccgagtcaggcccccacacccagcccacttatgcccttccctcgccccgcgccgcgcctcccggcagccaccaccttgtcgcccgagtctacgagagcaaagctgagttccggtcggccctgcagcacgagaaggagggttacaccatctacaagacgcaggtgcgcggcgggggcgtggcgggggcgggggcggggcgggggcgtggcggggcgggggcggggccgcgggggcacgggggggcctgatcccttcccgcctccccgcagctgggcgaggaccatgagaagaccaaggaaagctccgagtacctcaagtgcctgacccagcaggccgtggccctgcagcgcaccatgaacgagatctaccgcaacggctccagcgccaacatcccgcccctcaaggtgagtccggggcggagcggcccctccggcccggcgagcgcgggagccccgctcaccgctggtttccccgccccgcagttcacggcccccagcatggccagcgtcttggagcagctgaacgtcattaacggcatcctcttcattcctctcaggtgaggcctccgccccactcgagtgtctcccggttgggggttttttgtgagtcggagtctcgccctgtcacccgggctggagtgcggcggcgccatcccggctcactgcagcctccgcctcccgggttcagcgattctcctgcctcagcctccccagtagctgggattacaggtgtccgccacctcgcccggctcatttttgtgtttgtagtagagatggggtttcaccacgttgaccaggctggtctcgaactcttaaccttgcgatccgcccgcctcggcctctcagagtgctgggattccaggcgtgagccatcgcgcccggcccgccccgcttatcttccccagcatcctcgcattccgcgagtgaagaccttggtgtttctgcttcacacaaagtatcttggcgttttcccaccagtccctaagaagcggcttcattccctccccacgcttcccatcctgcggcgggggggcctgaggagcaggccccgggctccccggggtggccacaagcagtgtggcctcctgtggggagtggatttggtcagcaaggcgtggcagcagccccccaactccgctttcctccccctgcgctggagggaggccaccgagggcagcgaggggagccccgaggccgggtcaggtgcggggtccttaccttctccgtgttcagggaccttccgccttcaggagggaagcgcttgttcacacacattccccactgaatagagcgcagagcctgagcttatcccacaggaaagccgggaggcgggtggagcccccaggactcctctgagagccacctccatccccacccttatcctcagccaaaaagacctggagaatctgaaagccgaggtggcgcggcggcaccagctccaggaggccagcagaaacagggatagagccgaggagcccatggctaccgagcccgcgccagcgggggccccaggagacctgggctcccagcccccggctgccaaggacccttctccgagcgtgcagggatagagagggagccagacggacagccagccagcggccccgtcaccagggagcccgactgcgggagaagggggcgagcctgcgggcggaagaggaagcaaggccctcttcctccacgtctcaccccaccccacccccgtgtcctcctgggagcctggcctgcctgccccgcagaaggtgtttttgcgctggttcaatgaatagatgatgcagaggccccattggagacacgtgaatggcgtgtgcggccatcagttcccggctggggggcaggtgttgcttcggcccccgccctccggccggcgtgtgcgagtgcgcccctggctgtgagtgttgaccgttcctctcccctgtacatagcccgagccagtcctgagtgggtgactcctgagtgggtgacgcgcagacgggatttctcaggtcatttgtatggtcgacatgatggctgctgctttggctgccaccacccccgggcccagcctgtctgaaagttcagggtttaggccgaaaaacccggtggggaggggtggggagccggagctctgtggcggggctggagggctggggtgcactttagtttggggcgggacgggagccgccgttgtgactggcgtggtctggctgctgctcccgaacggaggggtcggggttggcttgctgggccctcagagcccagtgggtggctctgactcggctccctactccctgcacccagctgggcgcagccttggggcctgcggtctgaatgtatccctcccctcagttttaacctgagctgccgaacgcacagtgggccgggggcgaggctgggggaagcggggcccaattacggatcccgggagttacaggtgccgacgtgatgtcgcttctctggtgcccagctcccttcctggtctgagactagctctgggggtggcgggggcccccacacgctgctcccgctccaccctgcccgtgctgctgctctgtgcctgctgtcagagccctggtgggggaggatgtggccaccctgagacccggaggagacgggcgtctgcctgggtttgcggagagccgcttatgggtgtggtccgtccagacaccttgtttcaagggggatgggcgtgagcgggcaagcagagcatccccaccgctgagcaagaactttttcttgtttttaaaccatcacgtcctcatttcacattggaataaagtgagtttttgaaacctgcggccccaggctcacctgtgtgttctgtaacccggtctgggtggatggtgagggctgacaggaatgtgactgggagaggaatagatacaaacgaggtcaagttcgaggtcacgcttacattgtcacttgagtgggaggtaagggggtggaatcacaggcactcagctggaattcaccgagctgccagtccgtcaccaggttcgcgggagtgtcgtgcaggtgaatgtcacctgtcaccaggtgcagaagaaactgtgaaggccaggtggggaggggtgctgggctgtggggccaggccctgtgcatgctggacccgtgaggtcactgaacacccccctggctggccacctgcccctgtctcttcactcgaggtaggaaggagggtgggcagcactgcccagaggtgagacactgggggcagggaggagggcctcaagttcgccaccctcggacaggattcagagagccaagacccaggtggacttgagcggcagagcctgtctctagaggggaagttgagctctcagtagctgctgaccgctgctcgccatctgtctccaagagcaggccctcggccccaccaggaacatacgccttttgggatgcttggagagatctgtacgtcttggaaattctgaaaagaaaaaaattccatccctgagtctgtcagttttcctgagccaaccggagaaaaggtgcttctgacctggcggttttaggtgacacccggggacagccaccagggagtgagtgtcctgctacagaacctctcagacttcccagcagccccagcccagcagcagcttcctttgctctcaccggtgtgtcctgaacattctgtcccctctcctgagtgtttgttgttgaacgtgagccacatgttcatgcacctctcaaaacagggcctcctgtgaagctgagaacagatcggggttggttagggttgtgcctccttgtcacctgagaggcccctatttcctggctgatcctttaagcgtattagtgccctcagacatcttttgacgacccaaatgacaaggggctgttttcataaagcaaatggaggccctaggtgtgaaatccactctttctccttcccttcttttaggtgacaggtttcaactttttaaaaagtgggccaggcgtggtggctcacgcctgtattcccagcactttgggaagccaaggctggtggatcatttgaggccaggagttcaaaaccagcctggccaacatgctgaaaccccatctctactaaaattacaaaaattagccaggtatgtgatggcggacacctgtaatcccagctactcgggaggctgaggcaggagaatcacttgaagcccaggaggctgaggttgcagtgagccgaaatcacgccactgcactccagtctgggcagcaagagtgagactgtcacacacacacacccacatacacaaattggggaaattcctatatatcctgcagctggagagtaaggcatcctgatgtggcccaaattttcctctcccctacctctaaggtctaaactaccaaatcaatcaggacccccccctccccacagagtgcaggcccagccatcctcgaatggcaggtgaaatgccctcatttgtgggagtaagccattattttatttttgagacagagtcagtcaaggtcaggtgaccaagtgggaatgaagatcataggacatcgtcacaaagggacaaactccacatgttcaaagtgaggataggccgggcgcggtggctcacacatgtaatcccagcactttgggaggccgaggcgggcagatcacaaggtcaggagttcaagaccagcctggccaacatagtgaaaccctgtctctactaaaaatacaaaaattagccgggcacggtggcacgcgcctgtaatcccagccacttgggaggctgaggcagaagaattgcttgaacctgggaggaagagattgcagtgagctgagatcatcccactgcactcaagcctggatgacagagtgacactctgtctcaaaaaataaaaataaataaaaggatgaaagaggaaagatcgggatccagacctgagctgcggggccaagagaccagtgatgtgcccaagtttctttggtgagaagttgaatcatttagctcggtggttctcgaacctgagcctgcctcagtcattggaagggcttgttataatagattgtgaatcaagcaagcaagcaggctgcaccgcttccactcaggggttctgaggcgtgagctcccaggtgctgctgctctgctgaaccagggaacacactttgaggatgcctgtcctagagcttctggtgtatcagcagttaagaaccgtctgcacacaagtcaggtttcaccaggctaggcagggacagagctgccacagccagctaccctccccctgcatcaaaggccatacacagtcatgactcctggaaggaggtttgaggcagttacaagccagcgagttacttgccaggttttgaacagctaacagcatttctggatagtgatactaacgctagaactctgcccctggggccctatcatctggatctcagcctggaagagtcttgcaaggaaatggaaaagctgcaaaagtgcagggaactaacttcaggccaatttctttgttttttcttgcttttttgagccagggtcttgcttcattgcccaggctggagtgcagtggtgcaatcctggcccagtgcaacctccgcctcccaggttcaagtgtttctcctgcctcagcctcccaagtagctgggactacaggcacctgctaccacgcctggctaattttttttgtatttttagtagagacggggtttcactgtattgtccaggctggtgtcaaactcctgagctcaggcaatctgcccgtctcggcctcccaaattgctgggattgcaggcgtaccactgcgcatggcccattccttttttgctctgggccaagctcctattttggggcaggctactactcccaataggaggcaggaaaacagctgggctgtaagaaaggaaccagcacatcaccaaactgtcctttgtagggcaccttgaatacaccacagatacagccatgtgtaaagtgcagagctggggtttctgggacaaagatgaacactcttattttgtatgtttcaaccaaaatcgaaaacagtattaaggatttacttttatgattccaagaccactgagcaagattagaggctaacagaacaaagggggtagggccccatcttttttttttcctttttgtggagaacggggtctcgctatattgcccagggaggtcccgaactcctgggctcaagctatcctcccgtctctgcctccccaagagctgggattacaggcgtgagccaccgcgcccggcagggccccttatctctagactctgtccccaagagtctagtcttgggcctgtaaccagccatcctggctttggctctctggccacagcgatagccacagtcagaacgggctgctgggagggttggggagagcgggcctgtgccgcagacgcatgccatggcaaggctcaggctgaggcactccctcctccacccgggggaagggggacagcaaagccagttcgggtgctgccctgaaggaaagcagctcatgaggccttactgccctgacaccgattcgtgtcactctttgtgactggagctacacacagccccactttctatcagcatttcccctgtgcaaaggaagacaaaaaaaaaaaaaaaaaaaaaatcacatctagttttataggcatttaatagtttaccagttggtacaataagattttttaatatgcagaaaacatgaataaattttgttttacacagtctgagagcaacaaatcttactgtaaaacacgagagcaatattatatacattcctttactgattttttaaaattgtgtcaatatcttcagtgaactcttaacaatctggggaactgttttcctcaattaccacttcagcaacgttcatacgaaatcaaggcttgccttcatgtcagtgtcaggatcaactttaactcgaagagtttgtgtttgtctctaacatcttcagagtgagctttagggatgcctgaaggatggacagtacaagcaagcagctacttccatgatacagtgggaagataaaaaggcccattcagtccagccgtgacctgtaaatccagcttgccctccccccaccccactggaaaaaaaatccaaaacctttttccaccagttttttacatgtcgcttctctaccaggagattctttgcgtcatctagatgaacacactggacttatatacagctggacatgaaagtaaccaatttaagtgccttttccttcaacaattttaacttcagttgcttaaggatgatcgagccaccgatgtcaacaaaatatcctttacctttaaatagtttttctttaattaagtttaaagaaaacctatttaacgagtgatattaccgggaaagttcacacagaaacagaaagaggcgaacgggagagcagggcactggcagcggggaggcggggcttggtaaatctaaagccaaagcttccaaagactacggcgaacgctccccagcccgggacgacttgctaacactagtgattttgagagtagtgctctgggcacaccattggtcacaccacacacagacgaaccaggacggtcttagtctcctaaagtgcaagatgccgtgacaacaggcaactaggctccacgcggtgtctaaaccagtctccatggcatgcactctcaagagcgcagctaggatttcttgggcacgttacagatatatatttgggtggcactggaatgtctgttttcacacacacacacagtcaataatcatctgaggatgcaattctaccagctctttatttcttaagtggccaatttgattgagaaagtgacaaagcagcagtgaacctctaaaccaattaataaaagtcctctacttacaatccaaaccagtaacctcatcattgtccttatcccaggcaaggcacagggttagacagcagacagagaaaacagagaacacagtcagaaagggcatcaacaggacagtgtcagacagcagtgcaggaaattttgcaaatctgattccaggttgtagacggactgctctcccccaccccttcgttattaaacagggctcattacatgtggacccagttgtgggccatccctgagattcaatgttcgctgcttctcacatggaggatgtctggtaactcaactcagcagcaggctgtggcaatctcccaagtaaggataactttgtttacagagtaatcgtttcctcctcctttgtcaacgcaagtcgctgtgtgctgcaggggaagacacgcttgcttcctcctgcatcggtaccattctcctttattgttcaatatctatgagtgatttctagatgttgtggcttacccttaaacaattcatgctaaaaatgaattaaaatacaagacatttatacatgtacaaacaaatgttaagatgcaccatttctatgtatttatatttctcaaaataggacagaaaatagcagcaaacaagaacaaagatattttccatagtttttgtagaaaaatccagtcagaagagctaagggaaaaagacttttcaatgtaagcagggttgtgaggcaatattgtcctgaaaattcacctactgtatgtatttaaggaattagcttaagatgtaatttttgtcctcaaaaatagccattagttctcaaaactttcccttccagagacatctctcaggaatctaaaaacaaacaagcaaacaaacaaaaagacacaagctagacataaagctgcttctagttaatatacggcctagtctctgtgtgtatctacaggacgctaactctcaccctttgtcttttgcaggaaccaattttccattaaatactaaaggggacatttaaaaaatcacatagtacacaaatgaataaaacgcagttcagaattttatctttgttaaactgtcactgttatctcattgttctgttaacttttcaaataactctcttggaaacaaaaaaaacctgttggttagctaagcaatggaattctttattaataactgacaatggaatagtgctccaaaagtcatggctaaaaattctcttaaacctacctgtaactttgggtcaaaatatacaacatatccgggttgtgtaaaatgtcgagcggctaaattagagggggacataacggaagtgattttccttcggctggaaaaaaatccccagagtcagacctagttttcagaagcattaagatcaaaaagggtttgttctaaagcatggcattccacagcaacatttattctacttgtccgttttagcactttttcaaaaacccaggactaaggacatggaggttgatgtgtatgatacacacatacagacttacccacttacagataggcccatatacttacaaacatttacatataaacaaaaggtgaaaacagtacatttttatgcacgctccattaaaccctgtcatttttttaaaacttgtaagtgaaacacagtttaaatcaatatcagattcatgttgaaaaacaaactgctgtattcctcccactcctttcaaatgggcacacagaaccttctcagtatttctgtcattatgtaatgcacattgcacatccctaaaaaacaccaaaaacgaatagtgatttgtaccatgacacactcaatggggagattaaattctacttggaagtcacatcactacacagtctaatagtatggagaatacaactagaagtatgtccagtgtggaaaatagaagcttagagtatgacagtattttttgacctgtttacaaagcattaagaccaaaatgaaataaatgagttgctattagctgctgagatttttcttgagatttacagtcattttcttacataaatataccactagcctctgcgtgataggctgccaaaacaaatatatcctactgatttggcaaatgtgtcatgacaaaaattccaatgtataatccccattcattacatagatggttcagaagattctgaattgtagccttatcatctaaaatccttacagaagatttattaagcacacttaagtgatgttacatagatacacatttcagaaaaagccctaataaccaccacttttccccaaatgaggccatcaagtcaggcaccaacagatagcagaaagaaaaacaggaattaataatccaacataaaatgacactgtcaactattcagtttagtgccctagttcaattgattcaacttctgccttcttaggcctggtgtgaccaatgccagcccaggtttttaaaccctatggtacttctagacaacgtatgtaaatttacagtatacaatttggattcaccatgcatgaatactttgtgtgtaacatttaataagctcaatctacatccagaataatttacatgaaaggacaatatttatttaaacagagctcaatggggtaaccatggtatcatcagagtgcatccagaggaaaagagggaggaggggccgaaggagacacaatcaacggcactcccacacttttactgtttgatctacgctgccagtgacgacatagggtgccgtcttgtggaaatctgaaagaaaaagaaatggtttatttaaaactcacacgtaagcctggacaacaaacatagtgagaccccctctctacaaaatacaaaattaaaaaaaaaattagccgggcatggtagtgtgtgcctgtagtcccagctactcgggagactgatgcagaactgtttgagctgggaagtcgaggctgcagcgagccatgactgcaccactgcactccagcctgggtgacagagcaagaccctgcccggtcccaaccctccatcacactgagccagatacaatttttaatgagccacaaaattctaagaaagtccaaatgccagtagttttcgtgtttctctaatataccataacccaagaaggtatctagtttgccaattcagttagggaagttgagactcaatgatcaaatcctgtattaacatctcaataaaaacgcctgttcctctttggcccatcccaaatggggctcaaatcctttttcttcttttttcaaaggcagggtctcactatgttgcccaggctggagtgcagtggctgttcaaaggtgcgatcccactactgatcagcaagggagttttgacctgctctgtttctgacctgggccaggtcacccctccttaggcaacctgggagtctcctgttcccaggaggtcaccatattgatgctgcacttagtgcaaacatcccatcagcacagcacactgtaacccagaactcctgggctcaagcaatcctccagcctcagcctcctgagtagctgggactaaggcacagcagggctcaaatctaacaatacacagtctcgccatatccatttactgaacacgatgttccaggcatggcataaatgctccgtatttgtgcctaatccttgaaccaatcctgtgaggcaggtattagcccaccttacccaggctttggtccattatactttagtgcatttattatacttgactgtattcactctcttaaattccagattcaagtccagatgatagtgaggatgtttactcaaatcaaatacaattttctgagtttctagtatatgatagtatacacctgccagtgggaaaggttgaggaagattttgtttgagaaacaaactaataggggagaaaaattacccatcagagtggtaagtaacctcttcacaaattgtggtttccaaaaccaatgttgtgcagtggagaaagtaatgtttttattataaggctaacgatggaaagagttaacgggaaaggagaatttaaaacaaatggtaggaatccacaagattttcatgtcttctctattctgccctgaaagcacagtcatttcttacctggcaaagtccacacgattatgtaaaacacagtttgtctggcactccaaaatctaatgttcagagacctcgcgaggcgtacatacccaaggaggtaacaaagtgttcatgcgcattgagggtcttcatgcatcgcttgttcttgtaatcccatacgcgtagggtcttgtcatcagcacaactcaaaataaacttccccccagaatggaacagaactccacgtacccagttatcatgacccaccttaaaaacaaaaaagttatttgactcagtaaaaggcaaaatgtttaaatagcatctatttcataatacgataaaactatacataccaaaaacatcaaaagaccagaagaaaataaaagtctaggggattctagattaaaggaaactgaaaactcataagacatgaggagtgaatataacgtacgatccctgactgggtcctggatgagggttaaaaagaagtcccgcagggcattatggaaataacaagaacaaatctcaatatgtagtctatcaatggtaaatttcttgagtgtgaataattttattttggttatttatatactatccttgttcttaggtggttcatgctaaaatacttgggggtaaagtgttacgatgtctgcaaagaacgctcaaatgatttcagcaaaatatacacacatacatgaaggaaaaccaacaaatggtaactaagtgaaggatatacaggcattcactatatatctatatatccatccatccatccatccatccatccatccatccatccaatcatccaatcatccatccatccacccacccacccatctatctatccatccaatcatccatctaatcatccatctaatcatccatccatccatccatccatccaatcatccatccatccatccatccaatcatccatccatccatccatccaatcatccatccatccatccaatcatccatctatccatccaaccatccaatcatccatctatccatccatccaatcatccatccatccatccatccaatcat

SEQ ID NO: 75 - DNA, 32464 bp, Homo sapiens
  misc_feature (1)...(32464): n = A,T,C or G
ttgtatttttagtagagacagggtttcaccgtgttagccaggatggtcttgatctcctgaccttgcaattcgcccgcctcggcctcccaaagtgctgtgattacaggcatgagccaccatgcccggcccgttggcaatctttcttccgacttctgaagagaaccactctgttttagagcagtgtttctcagaggggttattttacctttcaggggtcttttcacaatgtctggagacatttttggttgttatagctgggggtaggggtgctactagtatctggtgggttgaggccaaggatgttgctaaaatatcctacaatgcaaaggacaccctctcacaagaaagaatctggaccaaaatggcaattgttttgaggctgagaaaaccctggtctccctatagggaagtgcagtgcctctacggcttcaatagccatttatgaaaaatccccaaatttattatctccagcccgggcctctccctcaactaccaatgctgcctctccaatgccctggacagttcacagacacctccaacacccaaaccaaaccctttatcttttctccatgttcctcctcctgggtgggactcccattctacccgcttctcaagctaggaaccacaaagcatccttcacatgcaaggtcgtcaccaagccttagttcatacttttttaaaaaaattttttacaagggcacaaaaatcaggcaattggttcattcttggtcgtgcctctcatatccaccacctccttggtccaccagctcctgcctcctggttaatgccagcagcacgatctcttccctggacaattccaatcccctctaaattcacctttcttttcccatctacccctctgtggttgattgctatcttccagaaacacatattgtatgctccaccctgcctccaggataaagcccaaacttcttagcatggcattccaagactgttctcaacctgcttttctgaacttctctcccattagattcacctcccagccctccagtcaaccaaattacatgtcctttctcaaacgtcgtacaccatccaccttctatatctttccctaaggccttcactcatcactgcttatgacaattctattcacatttaagacatagcctccatgaagctttagagatttccccactgaagctaacttgttcctgttctgatctccatcacattttatttcttttaaagaatctttcacatactttgtcatacatatttgacccctccaacactcttaagtcctataaaggcaggcagggactgagtcctcactttggtaccctttgtagtatatgacatatgtcctagacatgtaggcaactcactaaaggtttcagatattgaactgagaagtctgaaagaaagctgctttctccacagtacagagaaagatgatttttgttggaaaagatttatagagaaatttctttcctaaagtttgacctattttatggataaatgaatgctaaatatcacaaatctttgtatattggtcctgaaaggaaaacctggagatactgagttagcaagctcatttattagctgtatttttcttttcttttcttttctttttttttttttgttttgttttttgagacggagtctcactctgttgcccaggctggagtgcagtggcacaatctcggctccctgcaacctccacctcccaggttcaagcaattctctacctcagcctcccaagtagctgggattacaggcgcccgccaccacgcctggctgatttttgtatttttggtagagacggggtttcaccatcttggccaggctggtcttaaactcctgacctcgtgatccacccacctcggcctccctaaatgctgggattacaggcgtgagccactgcgcccagctattagctgtatgtttcctatacagaatactcttgttcacccaagactattaagaacttttgatctccagctgggcaaggcggctaatgcctgtaatcacatcactttgggaggccaaggcaggaggatgccttgaggccaggagttccagatgagtctggccaacataatgagaccccatctgtacaaaatatttattattttattttattttatttttgaaacagagtctcgttctgtcgccaggctggagtgcagtggcgcgatcttggctcactgcaacctccgcctccagggtttaagtgattcttcagcctcagcctcccgagtagctggaactacaagtgcctgccaccacgcccagctaatttttgtatttttttagtagagactgggtttcattatgttggccaggatggtctcaatctcttgacctcatgatctgccagcctcaacctcccaaagtgctgagattgcaggcgtgagccactgcgcctggccgattttattttttttttattttatcttattttattttagagatggagtctcactctatcacccaggctgcagggcagtggcacgatctcagctcaatgcaacctccacctcctgggtttaagcagttctcctgcctcagccttccaagtaactggaattacaggcatgcacaaccatacctggctaatttttgtatttttagtagagatggcgtttcaccatgttggccaggctggtcttgaactcctgacctcagatgatccacctgccttggcctcctgaactgctgggattacaggtgtgagccaccgggtctggccaaaatattttttaaattaaaaaaaagtttgaaaagaacgtgatttccctctctccttttaaaactgcactcatccttcaaagcccaagtgagaccgggagaccctgtctcaaaaaaagctttcctgatttctctagtgtaattcatttcttcctcaatgcttccattgcactcatttaatagtatttatgactttctacattctattactgttattactatcctattatttctaaattattttattattatcatgtttccttaccatttaactcctagaagacagaggctacaattgagtcatttccccctctctgtaacttgttcagtccttagcacataacagaccataaatgctgaatttactggaagcattaatattgagcagtcctagacgagtggatacaaatttcctaagccaaactgaatttgtttgggccagtatttgacagtggattaagaaatacatctcagactgggagcaatgactcatgcctataatcccagcactttgggaggccaaggtgggaggatcacttgtgttcaagagtttgagaccagcttgggcaacatagtgagaccctgcctctccaaaatataagaaattagctgggtatgggggtgcacgcctagtcctagctcctcaggaggctgaggcgaggagatcgcttgaacccaggatgtcaaggctgcagtgagctgtgatcatgccactcagcctgggtgacagagtgagaacctgtctcaaaaaaaaaaaaaaaaaaaaaagccaggtgtggtggcaggtgcctgtagtctcagctacttgggaggctgaggcaggaggatcactagagcctaggagttctgggctatagtgtgctatgcccatcgggtatctgcactaagttcaacattattatggtgacctcccgggagcaaggaaccaccaggttgcctaaggagtggtgaaccggcccaggtaggaaacagagcaggtcaaaactcccacgctgatcagtagtgggatcacacctgtgaatagccactgtactccagcctgggcaacatagtgagaccctgtctctaaaaagaaagaaagatgggtctgggcatggtggctcacacctgtaatcccagcactttgggtggccaaggcgggtggatcacttgaggtcagcagtttgagaccagcctggccaatatggtgaaaccccatctctattaaaaatacaaaatttagacaggcgtggtggcaggcgcctgtaatcccagctacttgggaggctgaggcaggagaatcacttgaacccgggagacagaggttgcagtgagctgagattgcaccactgcactccagcctgggtgacagagtgagacttggtctcaaaaaaaaaaaaaagtgacttgacctgccttgcctgttagaataacctagaaatgagctatatcctcaatagcaggaacacagtttgcctggtgattcctcctgctagaaatccatctggtaccaatagtcccttttatatgtctacctctgccattcttttcctttaggacaatagttctcggtggatggcctagaaactcctggggtcttcaaagacaaaattactgtagtaatactgagatatttacctttttaacagctagcatttgtactgatgatgcaaaagcaatggtgggtaaaagtgctggcaactaagcaggaatgaagaccatggcaccaaattgtagtagtagccattgcattcctcaatgccatgcacttgcaatttttaaaaatgccactttctattaagaacgtccttgatgaagctgggtgtggtggctcacacctgtaatcccagcactttgggaggccaacacgggtggatcacctgaggtcacgagttcgagaccagcctgaccaacatagagaaaccccttctctactaaaaacacaaaaattagctgggcatggtgggtgcgtgcctgtaatcccagctactcaggaggctgaggcaggagaatcgcttgaaccagggagtcaggttgcagtgagccaagatcgtgccactgcactctagtggggcgacatagtgagactcggtctcaaaaaaaaaaaaaaaaaatgagtatccctgatgaagcagtacaaattattaattgtattaaatcttgaccctacagtacatgtctttttaatattttgtgtgaagaaatgggaaatatgcatatagcacttctgcatataatagttgtctcatggtttgtcaagaaaaagcacttgtgcaattaaactaacctttggcctggtgcagtggctcacgcccataatccaaacattttgggaggccagggcaggaggattgcttgagatcaggagttcgagaccaacctgggcaacatggagaaaccagatctgtacaaaaaattagctaggggtggacacctcacccggctacttttttgtatttttttgtagagatggggtttcaccatgtcatccaggctggtctcaaactcctgacctcaagcgatcctcccaccttggcctcccaaagttttgggattatgggcgtgagccactgtgcccagcccctctgcctatttttatttgggttgtctttttcattgttgagttgcaggagttctttacatattctggatactagaccctcatcagatatggttttaaaatactttctctcattcttttcactttcaagtatccctttgatgcacacacccaaaaaagcaaatagtgtccaattgcattctttgatgaagaagaatacaagcagtaagtcaattacagcctatttttttcttttctttctttctctttctctctctctctttctttctttgagacagggtcttgctctgttgcccaggctggagtgcagtggcacagtgacagctcactgcagcctcaacctcctgggctcaagcggtcctcccacctcagcctcctaagtagctgggactccaggcgtgtgccactgcgcctggctaatttttgtattttttgtaattttttgtagagatggggtttcaccatgttgcacaggctggtctcgaattcctgagctcaaataatcctccctcctcagcctcccaaagtgctgggattacaggcatgagccactgtgcccagtctatggttgtttttaagttaacagactagtgccgggcgaggtgagctcagcgcctgtaaatcctatcacnnnnnnnnnnnnnnnnnnnnnnnnnnnnnnnnnnnnnnnnnnnnnnnnnnnnnnnnnnnnnnnnnnnnnnnnnnnnnnnnnnnnnnnnnnnnnnnnnnnnnnnnnnnnnnnnnnnnnnnnnnnnnnnnnnnnnnnnnnnnnnnnnnnnnnnnnnnnnnnnnnnnnnnnnnnnnnnnnatggtggtgcgcgcctgtagtcccagctactcaggaggctgaagcagaattacttgaacatgggaagcggaggttgcagtgagccacgattgtgccactgcactccagcctggcgacacagcgagactccatctcaaaataaataaataaattaattaattaattaacagactattctggggggacaattttagccttacagaaaaactgagcagaaagtacagagaattccaggctgggagtaatggctcaagcctttaatcccagcactgtcggaggccaaggagggaggatcacttgagctcaggagtttgagaccaggctgggcaagatggtgaaaccccgtctctacaaaaaataaaaaaaattagccaggcacagtggtgcacgcctgtagtccagctacttgggaggctgaggttgaaggatcacttgagcccagaaggacaaggctgcagtgagtcaagattgtgacactgcccctccagcctaggcgacagagggagactctgtctcaaaaaaaagaaaagaaaaaaaaaaaaagaagaagaagaaagtaccgagagttcccatatcccccttcaggctccccatttttcctattattaactttttgcattagtgtggtacatttgttacaactgatgagccagtattggtatattattaacatagcccagccgggcgcggtggctcatgcctgtaatctcagcactttgggaggccgaggcgggtggatcgcctgaggtcaggagttcaagaccagcctggtcaacatagtgaaaacccatctctactaaaaatacaaaaaattagctgggcgtggaagcgggtgcctgtaatcccagctactcaggaggctgaggcaggagaatcgcttgaaactgggaggcagaggttgcagtgagccgagatcgcatcattgcactccagcctgggcaacaagggggaaactccgtctcaaaaaacaaacaaacaaaaaaacatagtccatattgatacattataattaactaagtccataagttacattaggctttactcttttccacacacaagtatgacatgtatccaccatgacactattacatcatacaaaatagtttcacttctgtaaaactcccctgtgctccacctaccatcccttcctccccccaactccacttccctggcagtcactgatctttttattatctccatagtttagccttttcagaatatcatacagttggggccaaacgcactgcctcatgcctgtaatcccagcactttggaaggctgagcaggaggattgcttgagaccagaagtttaagaccatcttgggcaacatagcaagaccttgactcaaaaaaatacatatatatatgtcatatggatggaatcatagtttgtagtctttccacattgatttctttcgcttagcaatatgaatttaaggttcctccatgttttctaatggcttgatagctttttttttttttccttgagatggatcccattatgttgccccggctagtcttaaactcctgaactaaagtgattgtcttgcttcagcctccagaaaagctgggaatagctgagactacagaaacatgccattttttttcctttgtagtagaagttagaaagcttttttttttttttgagatggagtcttgctctttcaccctggctggagtacagtggcgcaatctgggatcactgcaacctctgcctcccgggttcaaccgattctcctgcctcagcctccccagtaggtgggattacaggcacgtgccaccacacccggctaatttttgtatttttagtaaagacggggtttcaccgtattggtcaagctggtctcgaactcctgactttgtgatccacctgcctcagcctcccaaagtgctgggattacaggtgtgagccaccgtgcccggccttttttttttttttttttttttgagacagagtcttactctgtcacccaggctggagtgcagtggttcgatcttggatcactgcaacctccacctcccgggtacaagtgattctcctgtctcagccttctgagtagctgggattatagacgcctgccaccacacccggctcattttttttgtatttttagtagagacggggttttaccatgttggcgaggctgatttcaaattgctgaccttaagtgatccaaccgcctcggcctcccaaagtgctggaattacaggcgtgagccaccgcgcctggcctcaaaaaaaaaaattttttttttcaggacggcgtcttgctctgtcgcccaggctggagggcagtggtgcgatctcggctcactgcaagctctacctcctgggttcacgccattctcctgcctcagcctctcgagtagctgggactgcaggcgcctgccaccacgcccggataattttttgtatttttagtagagacggggtttcaccgtgttagccaggatggtctcgatctcctgacctcgtgatccactcgcctcgtcctcccaaagtgctgggattacaggcgtgagccaccgcgcccggccaaaaaaatttctaatacggcaaatattgaaagatataatccacataaacaaagcttttagggtcttctataatttctaacactgtaaatggttcccaagacccaactgtttgagaaccgcttctctgggatgccttcttcttttcctgctggctaatcccagtggagagatttaggtatttaattctgctccagactcacctctgagaaccttccctgatgggccacactctactcactgcccttgctctgtatcccctcttcagttatgttgttcctgtttccctggctgcttttaattttctttctttcttttcttcccgccttttcttttctttctctttctttttcgttttttgttttttgagacggagtctcactctgtcgcccaggctggagtgcagtagcgcgatcttggctcactgcaacctccgcctcctaggttcaagcgattctcctgcctcagcctcccgagtagctgggattacaggcgcacgccaccatgcccggattatttttgtatttttagtacagacggggtttcaccatgttggccaggctggtctttaactcctgacttcaagtgatccgcccgccttggcctctcaaagtgctgggattacaggcttgctgccgcacccggcttgtttttttttttttttttttttgagacggggtctcactgtgtcccccaggctggagtgcagtggtgcgatcacagctccctgcagcctcgaactactgggctcaagcgaacctcccacctcagcctcccgagtagctgaaaccacaggagcgcgccacgacacacagctaactttttttttagtgttttttctttttttgttgttgccttttttttttttctttatcgatcctcccgcattggccttccaaactgttgggattacaagcgagagcagtgcccggcccctactgctttgaaacctcggttctttgcaggtcctggaaaagaaagtgaaggggtcgtgcaatggctcaaaacccaggcaacatttccaggcgcgtcctcaactcggcgtcactctgacaaaaagtttgccctttgcgcccgatccctcacaccagagagcaccgcagggacgcagggacggagaggactaatggggtcggggaggacccaaggaagttggggaactcagactcttttcagtgtttaaaaagcagaggccccctcggaaggcataacaggcgagtctaacaatgcccctggagatcaacggcactaaggggtacctttgccccgctccaaggctccttgttccgccccctgccgccaagcaaggaatccggcgccgccggtcgtgggtagtatttacgacagtgctggcgctttgcggccggccgcacagccgctgacgcgtcgggaggcggagcctagggaagcaaattctcctggcggcctccgttcagacgcggcagctgtgacccacctgcctcctccgcagagcaatggcggtgtctgccgggtccgcgcggacctcgcccagctcaggtaggcttaggaccccgccctccggcggagagttcctaggagcgctggtctcagaggggcgggggcgggaggacgcccagtgtctcccggtgaggcggggggggggtcctctgtggggaagggggcgtgctgtgagacatttgcagcctgcggcttctgaatgatgatgacattcgggaacactgcggttaggggactgtagtctgaggggttctgggacattaggggatcgtggagagggggctgcactgcagggatgtttcctatagtcagatcattgaggcaacctcattgagccgacccgggtgggcggaagctctgagctgttggtgcagtgatttctttgatttgaggtggagcccacccccgcacacatattttctccatttattgattgcagataaagtacagaaagacaaggctgaactgatctcagggcccaggcaggacagccgaatagggaaactcttgggttttgagtggacagatttgtccagttggcggaggctggtgaccctgctgaatcgaccaacggaccctgcaagcttagctgtctttcgttttctttttggtgagtccagtttatgggtgggagcaatttggttgagagtggagaatgacaatctctattttttggttgcaagtagacttagctcccttttcctcagagctgaagacattggtataaaagaagaggtctttgcgaagtttaggattaaacctgctttgtctcctacagttaggatttacttggtggccagaaatgcttttttttttttccttagacggactttcgctcttgttgcccaagctggagtgcaatggcgctatctcggctcactgtaacctccgccacccgggttaaagcgattctcctccctcagtctcccgagtagctgggattacaggcgcccaccaccacacccggctaattttttattttttttgtatgtgtgtttttagtagagacggggtttcaccatgttggccaggctggtctcaaactcctgacctcaggtgatccgcctgcctcggcctcccaaagtgctgggattacaggtgtgagccaccgtacccagctagaaatgctatatgatatgtagaggcgaggcagcagtgacccattttgcttgtggcatgaagttgcccagaagactcagagaaacagagcagggggccacagggaccataccttttggctgtgactccctaatcaagagcttcttaactgaggccgcagcatggtgtgcttggaatggtttacagatgtgcagagatattagtccccttagcccagtagttctcaactggagggagttttgctccctgggagacatttggcaatgtttagagacatttttagttgtcacaacttgggggaggaagaataggtggctgctggcatctctatagaggtcagggagtgctcctaaatgtcctgtagtgcattggataatcccctcaataaataattaaccagcccaaaatgtgactagtcctgaagttgagaaaccctgctttatctcaagctggcttcctgatctgagtagcctcttctgtttattcccagggtgttgacgaaatgcaactgtttttggagtgtgccaggaagcagaaaaggttgagaagcactcccagagcactttctttctttctttctttctttttttgagacggagtttcgatcttgttgcccaggctggagtgcaatggtgtgatctcggctcactgcaacctccgcctcccaggttcaagtgattctcctgcttcagcttcccgagtagctgggattacaggcatgcgccaccacacctggctaatttttttgtattttaagtagagacggggtttttccatgttggtcaggctggtttcgaactcccaacctcaggtgatctgcccacctcagcctcctaaagtgctgggattacaggcgtgagccaccgtgcctggcctcccagagcactttctgaagctcaataggatggatctttatagctgtcaagaccctaacagtttttatagcattttgtgcatttctgtaatttaatcctctctgtagtcctgtgatgtattccccttctcacaaatggggaattggttaaccgagctgcaggggctgttctagatggcacaacagatgtagtactgtgcagagtaggcactcaataattaatactgaataaatggcagagccaagattagaaaagaagtctgaccctggagctgcacactgtcaactgtgttccactgtattctactgcttccttagctgaggcccaatgaccaactcccctattgccttcttagggttcttgatggtgctagacattccccaggagcgggggctcagctctctggaccggaaataccttgatgggctggatgtgtgccgcttccccttgctggatgccctacgcccactgccacttgactggatgtatcttgtctacaccatcatgtttctgggtgaggggaactgtgggaaatattgactggcctgccagaaacacagaaatagaagcatgctggtgaatggtcaaagtctttggcaccttatttcacttctgctgtgatcaatttcatgctgttgacctgtgtgtcacttaagctgtgatcccataattctttttaaaatattaaaataacatttaattttcatttagttttatgtgattatacaatgcttgatttttcttaattccaaccatatcctggtccagggaaactgggcctgtggtgatctcttgacctcttaatcctctccctacaaatcccaggggcactgggcatgatgctgggcctgtgctaccggataagctgtgtgttattcctgctgccatactggtatgtgtttctcctggacaagacatcatggaacaaccactcctatctgtatgggttgttggcctttcagctaacattcatggatgcaaaccactactggtatgagtcaggggggacaaaggggaggggttggctgggtcaggatggttatcagagataggggcccagtgaggttctggaatttttcagtcatgtttgcaaagtatggttacaaggtcactttgatctaggtggatttgggaggggaaagggccaactagttggagcgcttgggatgacacaaagcaaaatggctccatcccaccccttcagtctttccctatctccccaggtgccttgatttattcacctcttgtaaccctcttagagagaaaaacagaatactaaagccagacatggctgttttcagatactttaagggtggttatgtagaagagggagcagactttctctgtgtgagtccagaagggcagagttagagccaaaagtagaagttgctgtgaggcagagatcatgtcaggagaagagggcccaccagggctgctcagcattgctgttctcggaggaggtaacccttccccatttctggcttaggtgactgtctctaaggggaggtggagaagggatttggagataaggtggtggggcagttgaccttaaggattctttatatgttgagtgaaaagtaataaaataggtgtcaataacatgagtatggggaaaaaaactcaaacattgaattcattaacagtcattaagttttatttatttttctttttatttatttatttttaaatagagatggggtctcgctttgttgcccaggctggtcttgaacttctgggctcaagcagtcctcccacctcggcctcccaaagtgctgggattacaggcatgagccactgtgtccggcctatttgttaatacacacatacaaaacccctttggtaaaacttgaaactcattcagaatggccagctctgatcatagagaattaagaggcagttttgatagaatatctctgaaaagttccgttgtggggatatttgttgagatggcatctcactgtgtcgcccaggctagagtgcagtggcgtgatcatagctcactgcagcctcaaccttcttgtgtttaggtgatccttccatctcagcctcctgagtagctggaacaacaggtgtgtgccaccacactcagctaatttttaaaattttttgtagagatgggatctcactatgttgctcaggctagtcagaagttccatttttatgactttatgcattttgaaaaaatcacttatcatttattcagggttttccacatcgcaggcactatactaaatatttagagtttttcctcattaaaaccctgtaaggtcgatggtgctgttcacattttatgttttttggagtcagggtcttgctctgtcactgaggccagaatgcagtggtgcagtcatagctcactgcaacctcaaactcctgggctccagagattctctcgctttagcttcccaaaatgttggtattataggtatgaactactgagcctggcctgttcacattttaaagataaagaagctaagtattattgacgagtgaagaatttgcctaaggtcagctagcagttaagaaacagaagtgagtccaggtgttcatgactgcagagtccagtgctcttgaccacagtgtaagctgcccctttcccagcttctacttcttgaaaacttgctttgcttctgcttccccagagtacatctggtgttagtagcctgggtctaatcagttctcttccagaatacaagctgttagcaggaaccctcttatactggatcctggcacccaggtctatgaaatgttagtttatgttgtgtgttactctgctgttgagggttttcatttttttttaaagataatacaccgcatatttatttacacatacatagcttttcaaacactccatcaaattcctcccctttttcagtaattttctagtattgtagtccttttttcctgatttgatccattagaacaaactcaactgggagctaacaagaaatactgaactttttgctgttataacttagtagcaatatttcttctatgacttgtataatcatgttagaatttgctcatataattctaaaaggtctcagaataaccagggaggatatgggagatgtgcccaggatagataggattatcgtgtataaaaggaaggatggagatgtagctgcattaagcagctcccccctcaatgtttacctccctcggtgtaggtctgtggacggtctgctgaatgcccataggaggaatgcccacgtgcccctttggaactatgcagtgctccgtggccaggtacagcattttaggacagagggaggagctccttgacagccatgtggtcagcatggccatcccactgccagactacactctccgctgcctccctggatcttctgtttttagtttttaccctttgctggaaagctaggctggcttctcattttttccaatcccttaatctctgaattatcttatttgtcaaggaaagactagagctttgtccctgctagattggaatcctcatgacaaagagaaaggattcagtctgtgctttatgacttcttccttggtgcctgatactgtcgctgacattggttggatgtcaataaatgctgtttggatgaggcgaatttctgagatgaatgaatagaagatggggtctattcttccttgggccctggactcagatcagtatttattttattcatttaaaaaatatatataagtagattatttgggtcaaggactgtaatatttgggtcaaggactgtaactcaggagcatggattcaagttgtcctaactatatgctccttattttattcttgcctatctgtagaaaagattctttttgcttgaactttgtgtcacattttattttcagatcttcattgtgtacttcattgcgggtgtgaaaaagctggatgcagactgggttgaaggctattccatggaatatttgtcccggcactggctcttcagtcccttcaagtgagtggcagtcatggtggaggcctctttgaggcatgggtacagagcaggtgactcatctctctcagtaatggcacctgttcctactttgcctgaatttgccacatgccttcctttgtccactcatttccctattcagcagaagcagagtcagtggtatcaaaagattgagccctagctgctcttgggagatatatggtatagataggcaagaaaggaaaagaaatttaaaaaggaaaggaaagagccggaactggctgacttggtgagtgagccagtgccctcagcagctgccttggatggtgcctgtgtccttgccttgccactctagcctcccatcagagccctgcagctgatgtactgagaagatgggcactcactgttcaggctctgacaaaaccattattatcacttccacaaaacaaagggtcacctttctgatttgtcttcttcccatttcttctttcctcttgttttactttattctctttcttcttccctgttattttccagttcctgaagtttgacttcattatgatgttagccaagcattcaccttttaaagtgtcctctcactcatgacctccgtggggaacgtcccttccacaacacacacacatctcagtcaaattttgtcctaggagatctgcccttgcttattacataggatatgttagaaaacattgaacacctaaagtgtgtgaaaatgtagagggggctgggcatggtggctcatgcctgtaatcccggcactttgggatgctggggtgggaggattgcttgagcccaggagttcaagaccagcctgagcaatataagacactgtctctacaaaaaaattttttaaaaaaacagctaggcgtggtggcacgtgcctgtggttccagctacttcggaggctgagacaggaggattgcttgagcccaggagtttgaggctacagtgcaccatgatcatgccattgccttccagcctaggcgacagagtgaaacttcgtttcaacaacaacaacaacaacaacaacaacaaacaacctagaggagtgtcttcatgggtggattatgtaccttaggcatctacccagccactggagtagccaaggcacattcgtgctgtgaatgtgctttgatgtgttctccagtgggctggtgcttgaactttctccatgtgtttgcagactgctgttgtctgaggagctgactagcctgctggtcgtgcactggggtgggctgctgcttgacctctcagctggtttcctgctcttttttgatgtctcaagatccattggcctgttctttgtgtcctacttccactgcatgaattcccagcttttcagcattggtcagtacctgtagcctgggaggaaacaggaaccacagttttgcaggaagggactagccagaggcattgtttgggagtgggagagggtggtgtgagcaggagctaaattgaacccagggcagtcactatgaagtaggcataaatggggataagaggactggggcttctgggctcagttagtatgttgtacagtagggaatctccaggaagaacaaatatcttacagttaagaactactttgtggccgggcttggtggctcaggtttgtaatcctagcactttgggaggccgaggtgggtggatcacctgaggtcaggagttcgagaccggcctgaccaacatggtgaaaccccgtctctactaaaaatacaaaaacttagctgagcatggtggcgcatgcctgtaattccagctacttgggaggctgaggcaagagaatcgcttgaacccaggaggcagaggttgcagtgagctgagatcacgccactgcactccagcctgggcgacagagaaagactgtctcaaaaaaaaaagaagaactactttccttttcagtggaacacctgggagaagtctcctaagggaacggggttgaagaggcccagccaaactcctgaaatatgtattttctccctgctttcctaggtatgttctcctacgtcatgctggccagcagccctctcttctgctcccctgagtggcctcggaagctggtgtcctactgcccccgaaggttgcaacaactgttgcccctcaaggcagcccctcagcccagtgtttcctgtgtgtataagaggagccggggcaaaagtggccagaagccagggctgcgccatcagctgggagctgccttcaccctgctctacctcctggagcagctattcctgccctattctcattttctcacccaggtttgtaggggctgtggagtgtacagcaaaggctggacttagaaaggaacggatgacaatagttgggaaagaatggggctggttttgcagccccttcttggtaggggatggggtcagtgtgagaagcattgagctgattcccctctgtgctgccttcccagggctataacaactggacaaatgggctgtatggctattcctgggacatgatggtgcactcccgctcccaccagcacgtgaagatcacctaccgtgatggccgcactggcgaactgggctaccttaaccctggggtgagatgtctgatgctgacaatttactgttcttcagagcccccttgtgctttggggtctggttttgtcttacacacaccataaagcaaaacaaatttgagtctgctttgccttttctcaagagccagattgaactatcttttatgtgggttgagatagggcaatgcattcatttccttgaactgagattagattcaggaaaagtaagcaccactagcccaacaatgaaaaattcattcccaaaggcaagttccatttttttctagccagaatgggcagcaggcagggatctcgttgtgccattggcagtgcatgacatgtcttggaagttgataatgatgaggtgggactaatatgggggtttggggcaggtatttacacagagtcggcgatggaaggatcatgcagacatgctgaagcaatatgccacttgcctgagccgcctgcttcccaagtataatgtcactgagccccagatctactttgatatttgggtctccatcaatgaccgcttccagcagaggtgggcaaggggagcagagagtgggaaaaaatgaagcacagttctttttaccaagatgaacagcccttgcttcctggtattgtcttgcttaaaaagctgtccttcctctagtgcatgtcccccttgatctggttgtgggcatagctggttgcttccagcagggggcaccatcatccaggagaaaagtgagttgacttgttcttttagacactgttgacataataccttctcaggtagctactaacccccattatacccagtgctccagatctcttctgccttctttctctgccctggactggcaataacatgctgacacaggccatttcttcttctattccctgtccttaggaatgatgatgaaagggagagaactggaagttctggtgggtgggtggctgtgatgtccttagaacatggttttctttcctaaggatttttgaccctcgtgtggacatcgtgcaggccgcttggtcaccctttcagcgcacatcctgggtgcaaccactcttgatggacctgtctccctggagggccaagttacaggaaatcaagagcagcctagacaaccacactgaggtggtcttcattgcagatttccctggtatggaggaaagtgaggagaggcttttctgtctttccttctggcttccttggccagggacattccatgtggtgggaggggagagggaatgtttttgaaacctaaggggatgatggtggtaaaggtgtgatgtctctgttctggctgggagtgagttcactctgccatggggtgggatgatgaactctgttggtctggcaggactgcacttggagaattttgtgagtgaagacctgggcaacactagcatccagctgctgcagggggaagtgactgtggagcttgtggcagaacagaagaaccagactcttcgagagggagaaaaaatgcaggtattttgctgggattaacaacagcagaaagaactgagtgcagtagctcacaccagtaatcccagcttcttaggaggctgaggtgggaagccaggaattcacagtgagcctgagcaacagagtgagaccccatctctaacaatttaaaaaacaatggcagaaagcttagatgagcaagattcacttattatagactgaaaatattttaccatagcagtaatgcagtggagctcaaaaaacaagggcccctgggactgtgaagagcctcatccaggattctagaggtccgttactttcgattccaaaacacaattgagtagaaagaagccaagagtcatagagtagggaggccataagctggctagagaaaagctgatgaaatttatccatttcttctcccttgtcagttgcctgctggtgagtaccataaggtgtatacgacatcacctagcccttcttgctacatgtacgtctatgtcaacactacagagcttgcactggagcaagacctggcatatctgcaagaattaaaggaaaaggtggagaatggaagtggtgagtgtatgaacatttgggctgagatagcctctggtttcaagaagtcagggttatgaatgatgttctagccattcaagaatgaacttgaagtctctagctggcagaagaggagttctaaggggagagagtgatccatctcagtgattcctcttttttctgtcttccgggcagaaacagggcctctacccccagagctgcagcctctgttggaaggggaagtaaaagggggccctgagccaacacctctggttcagacctttcttagacgccaacaaaggctccaggagattgaacgccggcgaaatactcctttccatgagcgattcttccgcttcttgttgcgaaagctctatgtctttcgccgcaggtaagttcacaacaatatttgtcattgccatcatatgttggcaagcttggtaactttcccctggggagagtaactctagagactgtcatacaggaaaggacagtttagctctaggtatcttttcctgccattcttcttgatttactggaagaataagtggcctatatctgatggcctgctttcttgttctgcctcagcttatctccagcctctctgtgggctgttcctaccctatcctggaatcctctaccagactgtataaagagtggtgtacccttccagctgggagatggagggtcacttggggggagattcccatatatgcctgtgtgggaggagtgaggaccaggtgccttctaagggctttagctgaaattcttctggtgaaacaggagtttgaacttggtcggctttttcctgtttttcagcttcctgatgacttgtatctcacttcgaaatctgatattaggccgtccttccctggagcagctggcccaggaggtgacttatgcaaacttgagaccctttgaggcagttggagaactgaatccctcaaacacggattcttcacattctaatcctcctgagtcaaatcctgatcctgtccactcagagttctgaagggggccagatgttgggtgcagatgtagaagcagccagtcacagacccattctatgcaatggacatttatttgaaaaaaattctcaaaagttttttttttttttttgggggggcggggttctaaagctgtttttaactccgagattacaacttagaggaaccaaggaaataaagcaaataagatttaacaacccaagattaagaggccaggaagaggttagacgcaatgtgaaactgtcctcctaggataaggtttaaagtggctttttgggggctgggtgccgtggctcacgcctgtaatcccagcattttgggaggctgaggtgggcagatcacttgaggccaggagttcgagaccagcctggccaacatggcaaaaccccttctctactaaaaatacaaaaattagccagacgtggtggtgggtgcctgtaatccaactacccaggaggctgaggcatgagaatcgcttgggcccaggaggtggaggttgcagtgagccgagatcgagccactgcactcctgggcaacagagcaagacttcgtctcaaaataaataaataaagtggctcttggggaaaagcaatttaatgtaccacgatgaatagctaactgttcccaagtgtttgctatgtgcaacacaccgcgtgagcagtgttacctgcattattacattaggctgagaggtaaaataatttgcccgaagacatacagctagtgacgaatggactgatggtttgaacttaacgtctatttgacttaaggtcctgcaccctgccacttgtaattttcagaatcactgataatctgaaataatgcagcttaaaacatgttttcttaattaaaagtataattggatggtggtcaggttgtaaatgcacacaaagtaatttatcttcattgcaattttggttccttctttgttcctattatctatatacacccagtgtttcactagcagttatgagagcagtcagaatagcagcatcaaagttaaataaggaaatctagatgattgctagattttctctaaaaataagcttagtatttggtattattctagcctttggtgagcagaaggggaggtaaagtaagaattaactaaatttagtaagggattagggaatgcttagacattttgtaggttggggtatacaagggtaactcaggaagctcctcagttcagtgaaaattcaaagggttggcactgagctaggaagcgagaatgcagggttatgaaaaaggatccctgctttgggagctcatggacttgtagcagagaccggtagtaaattggcagtctcagtaacttctgtaaatgattgcatctctttgcaggcttctcttcccatactctcccccactcctccttggacagtgttccgggggttctttcctaagcaactgctttttcagtatacatacttcagatgattgtgtctactccaggatttccaacgatgctaggtttctttcctgtgccctagacgtataggtctaagttccacctggatatcccacagggctatcaagctcagttcatcctaaacagaacttacattcatccccaactcagacttccttattctttattattgaatggcagctctgtaccttagccaagctgttatctctaggtcatcagccttgactcttcctttttccttgcatttcttaaaattgccaagtcccatcaattttacctcctggatacctcttgaatctatttttttttaaagacagggtttcactctatcacccaggctggagttcagtggcacaatcttggcttactgcagccaccacctcctgggtttaaacgattcttccacttcagcctcccatgtagctgggactacaggtgcccaccaccacgcccaactaatttttgtatttttagtagagacatggtttcccacattggccaggctggtctcaaactcatgaccttaagtatccacctgccttggcctcccaaagggctgggattacaggtgtgagccaccgtgcccagccaaatctgttttcattactacctatatctgtattttcaacctttgtattagcatctagttagggatagaccaggacagggccgacatgttagttgtcaagcagattgccaccctcccccaccactgaggaggccaaatggagtttggtggaaaatctctaattcattcaaggtattatatgggcaagcaatggctgtggcacagggtcccctgattactttgtaagaatgggtgggagggatgctgattttcaatccttttgcagatcttctctcatagtaacacaatagaagatactttgccactatgttgtttgccaaactcactgtacctacttgactggtaacaaaagtcccaagagttacttgggagaagacacttgaaaaagtatttttctaaatatgggcaaggatgctgcccttccccaaactgttagtataccacctctctgaccaattttcccaaggaagatattggggtagggtgaggtgtaaagaaaaagtggtcatgtaaatactggtaataaaagctgttcagtggggtagagttgggttgcaactgtagccattctaaaaatgggctatcaatgtccttttagccaaaagactttagtatacatcctcctcattctaccctcaggatttggatctttgcccctgatgggtatccatcccctttgaaactttagaaaggcaggttatatacagaatgttcaacctaaagacatttccttaagtcatactttcatgctttctaaactataatcacccttatcatcccctgctgttatgctttccctctgctccctgtggcctaatgttcctccaccaccttattaaccttcaggatacttttcccctaggctgggcaggacaacactatccccttggtccacaagctccctcaaggttggggaatctttgtttacttagcaaatactgaacataaccttaaagcggttacttttgaaaacttctcatgctattctaccaacttggaggcacctatccatgctcattcccctaatgtagccaatatggttatctgcaatgtattggcatctaaaaactcccttatgaaactgccagacttgttctggaacatttcaattacatgcaaaattcaggttctcaagttggaacaagtctaattgacacacctgcataggttttaaccttgccctccccctacttcccaacagatttccaagttttttgagaaggaaccttgctctggcccaggctggagtgcaatggcgccatctcggctcactgcaacctctgcctcctgggttcaagtgattctccagcctcctgagtagctgggattacaagcacctgccaccacacccagcttttttgtatttttggtagagacggggtttcagtttgccaggctggtatcaaaccgtgacctcaggtgatccacccgcattagcctcccaaagtgctgggattacaggtgtaagctaccatacccagatttccacggctttttttttaagtctcactctgttaccctggccggagtgtggtggcacgatttcagctcactgcaagctccacctcccgggttcacgccattctcctgcctcggcctcctgagtagctgggactacaggtgcctggctaacttttttatatttttagtagagacagggtttcactgtgttagccaggatggtctcgtgatctgcatgccttggcctcccaaagtgctaggattataggctcacgcctatattactatatagtggcctatattacaggccactccgcctggcctccaaatttccaagtttttaagtctccatgcaaacaggcataagcaagcactccttggctctacatttgcaggacaagctggaccaccattcagatgttggtagaaatgtaatccaagtggctattctctatgcatgtagctcctaggttcaagagcagtgtggtctgcggattttctacacaacctgccataaatgaaatttaagcctttggaaatttatagcattttcagctaatttgcattatttatctctgcaagatattgactagaaatcacgtttcagaacttctcagatgaaaacatcatacaacccttaaaactaagctcataatttaaaaatgtatgcagattaataggcttaaattgccaggactttagatagacattaccacttccaggttaatacttttagcggtttttatgccttcaatggtttgaagccctcaaccttagttgaaaacttaaaaatggcattgaatggctgctgcaataaggacacatgaattttggcttaagtggactaggaggactaaatcttgcttaggcttttaaaaaatgcccacccactgggtctagggattgaggttattttcctgaattatggctaattatggattacaattcaaggttaaagatacacatatagtattctcaggttattcatatgatagcattttttaagagccaaagtctcagtcacccaggctggagtgcagtggcttgataatggttcgctacagcctccaacttctatgttaaagtgatcctcctacctcagcctttcaaagtgttgggattataggcacgtacctatggccccaaagcactttaacaaatgagtaacagacacagttaaggtagaacctagcattttatttagatcttcattaaactgttggaattgagaaccagacatacgtaataaacctccaaaaatagatcctgaaaggcactttctgcttagggcaagcagtcatggaataagcatgtaaacaagctggcttctctgtaccacaccagccaagtcagctttctccatggccagccgcaccagctctgccctcccttctgttaacaccagccagaccccctgtaggtctaacccaaggtttttctgtaggacaccttggcctacctgggaatgctggaaacatgttgttaaaggaatcatggtgttgagagaaaaaaaaaaaatcttttaaaagctgccatctgaggtgatggcttctctgtacttacgccataccccagaatacaataaataagcaattagaaaacgttcaagtatgaagggatttcctcctccccgccaaaagcactgctctctgaaggaagctggtttctctgtagctacaccagctgttcagaaagctcattggacctggttttgaaaataaaacaaagttaaaaccctgggaggagttattgtgcagtgtggagtactcaggctttcttataaagaaaaaaaaaagttatctggtaccaaagtgtgcaacctacagaccctcaggtactgccctgtgacttctctgtatgacatcacaaggctgccaagtgcctgtttttctagaactaggagttggtgaggtttggctagtgctgaaaccatgcataggattggtttactaaattaaaaccttattacgtacgtcctccaaaagacagctgaaagtggagagattttgatttggtgctgttagaggtggcaattaagagcataagcaccagggagatggtttaatggtaactgccttttttgatgtcaggctggagctccaactgggaacttgcgttacatgcaagattgattggatagggaacactccctgacaaagagctacataattagaaatggatcaagttacagggaggataaggggaaggcttcacattcataatagagctcaagacattacaaattcatgctgacagggctgtggcattgccagacagaggctataagtggaactacaagtactttacgtgcacatcacaaggacattttcagcatctggtggggaaagtcaatgcaattatgactttggagcgttgggtgatagggcacaaaggttcaatttcaaagcattatttactacagtgttgtttctaggcagttacatggatcacctatgctcactaaattcattataatggtgaacaaaacacctagggacagaatagcaagcccaacttacagtcccccacaaaagctaaaattcatgtcattgactagagtgactgcaactggtcaggagctgaaagaggacaggaaaatttaggaaggagggccctttccctcagagcttgaaggcttctctgtagcctacgccaacaagtctggggaaaaaaggctaacactttcaatatttaagctttttgggcacttcccatgggaagctgtccctaccaaagtggccataggctgcagtcctctgataaattggcttcttcagatccagatccctggaatatacaagtccgtaacttaatatgtagcattaaattaaaataaagcaaaacaatcagcaagactcattttcaagagctctggcaaatgagttctctgggatatgctaggaaaaaaatttgtggcaaaagtgttacttccctggtgtccaaactccttgcacagtccttattagtaactatagttgtttttccgtccctggctcaacaaatacgaaaacttgtcattattctgagaaatttcaattgtcaaaaagctcacctgagatcacacaatacttaccaaggtcccgccgcccacaccctaccatggtttttacattgcaacaaaccttgagcaacccactttatctctattttcttaacacccttaagtagaagagcacaaagctcaaatatcaaatctggaacattctctagagtggttagcctaagccatggagcaccgtaattttaaatttctcaaataactaagtcttcactaaggcagcagttcaaaactgttccaggaattaaaatatattcccatttgaggagtcttccttcacaccttcacctcctcagccttaagtatatacacacacacccaacaccctcaatacttgactagcaacaggctttaccatctttacctgacaatgaccccagggcggagatcgaaattcttcttcacaatctctaatagctctctctcactcttctgagaggtaccataatggaaaatggagatagataatggatgagaaactccaatagcataagagacctaaaaggattcaaatgtcgtaagaatcagtgattgcaaagacccatatacttgtataatacgttggtataaaacaagtagttaagtagattactactaaataccctcccacttacatgacttttaatcgttcgttatataaagagtgtatacctgaacaagaaccctccggcacagacctcctttaacaagggattttgccacccaacgagcagcataagcagctgaacggtcgaccttggtataatcctttcctgaaaaggcacctcctccatgagcaccccaaccgccataagtgtccacaatgattttgcgtccagtcaaaccagcatcaccctgaaattacaggatttaagttactttacgcctagtgctttccaagtggattaggttgcctattctgaattcattcagcaaatatcctccgatgattcacatgtaggtttcagaaagcctgaaaaaaatgtagtagccaaaattttaagtaaccatcaaaaatccagaaaaatgcaacaaaatgacattacctgaggcccaccaataacaaatctgccacttggctgtaggtggtagattgtatcctcatcaaggtatttcgcaggcacaactgctttgatgactttctcctttagggcatccctcatttcatcaagacaaacctcttcatcatgctgaacagatataacaattgtgtggactctgatgggaagcacagcacctcgatcctgcatatactgcacagtaaccttgaaggcaacacaggtcatcagaacatcataccaaacaataactttgtatttgtttctctacctgaagttacaatataggaaaacaaatgctattttttccagttagctattatcaaaattatggatcttctgtgctgatgtaataaatgagacaaccaagctttatgatcatcacttacttgagttttagaatcagggcgtaaccaaggcaaagtgccattacggcgtagttctgccagtttggcatttagcttgtgtgccaagacaatggttaaaggcatacactcctcagtttcatcagtggcatagccaaacattaagccctaaagaaagaaaagtcaccaatgtgatcaagctccagaatttaatgttagaagagattaaaacagcctctacaccaagatacctggtctccagcaccaatgtcttcttcatttctgtcaagatgaacaccttgagcaatatctggtgactgttgctccaaggctaccagcacgttacaagtcttgtagtcaaaacctataagcaaaaaacacaacatcttgtttacgtcctagaaatacctgctgtttacagcaattatctggaattctaaacactgctgaagaaatcaaatatacctaaaccatcggaccttttagagaatgaacagaatagggcttagtgtatagtaagatacaactggagtttaggattagcaggaacattctaggagtttcttcaaacctcacagctgttacctagaaaaaaatgagcaaaatcattaaaacacacctttggaagaatcatcatatccaatgtgtttaacagcttcacgaaccactttctggtagtcaacagcagctctggatgtaatttccccagcaagaaggatcattccagttttagcaacagtttctaataaaaagagacattcaactcaaacatcacttctataaaaataatttttatgctatctttccaccagttgataagcacattctgaacctaccacaagctactttggcatcaggatcctgctgaaggtgggcatcaaggacagcatcactgatttggtcacaaatcttatctggaaaagagaaattcctggctcagtttctttaactttaaacaaagtatgtatgtatgtatgcaagctccctccctgttactatctgtaaaatctttggagattttaaaaaacatgcttaatacatcttaattcattgtgtttgcactttcctcctaaaattcaaagtttgcattataaatctaatcaccagaaaggtgaactgttagtcctatatcctttaaagaacagaatttgccctatatcatattcacttccacaactgtaccaaacccctctgcacctgggagtctggtagaactgaggccacaggtaggccagtttccctaatcttaaggaacaccaattataatgagcaacaagataattcgattaaacaattaaatgaaaagcattttctgactaaaatggcaattatctgattttgctgttaggagttgcgcaggaaacaaaagctcaacagtgtagaagatgctcaaacgtattccgaatccatgtctccctgctttgtcatctattgttaggagggagaacaaatatctccctaattcaagttcgtttttctgaattttctataaccgcctaaaacagaatccaaacataatgtggaagccagactgcaggctctgaacttcggtctactactaactggtgtaacagctaaccttcagcactcatcaagatcctgggtttgtcctctcataccactaagttacttgtgggatttcatcatgggcacagtaaactgaccagaccctaaagccaccagatagataactactgcggtcatcctaagggcagaaacagccaaaagagccaaataatcatctttactagccgatatgctcaggctgagattttcagttcctggaaatatagctttactcctccttcacgtgccaattgatccccataatggcggttgagcggacaaagcctcaagtaaaaccctgcaccgaagactttaaatgcgaacccaaagcaatggcagctcctaattcatgcttcccatccttttcacaaggggtccaaataaggactgccttcttggacatgagctatatttagtcagaggccgtcaccttggaggcaaggccatatccgccgaagggcatgtgcgtattctccagtgtgtagtcaagacctaaccactgaggcagtggagccagacgacgtcccaaggcataggccccccacccctcaaactgagggccaggacagccggggaggctcacggctccccctcgcccagataccacatgcggcaaacacgtggtcgccgctgcaatgcggggcgcgcgctcccgagggccggacgcgagcacgcggggcgggtcgcccactccaggtttgtcagacggcagggccgggaggggttaacagtgccctcccttcccggccagaactcactagcgaccacagcccccgcccttcacgttttctggaaccttccgcatgcctaggcgcgcgaccgaatgaaaagggaggggggaagggaagggtggagaggggagggggaagaggagcggcggccacgcgccaggccctggcggcgccacgaggaaagcgcgcggtcgccgctcttccatcacccggcggacgaggacgacccgcgcgggccccaccaccggccggccgcagccagccggaccttggcgctgccttctgccccgccccacgcttcgcttcaggccgtcccctcacctgggtggccttccccgaccgactctgaggtgaaaaggaatgtgccctcctcgatgaacgcctcgtggaagccgttgagctgtccgttcatgttggtgtcggtgtgcggaagtggccttacgaaggagcagcggcgaggcggcagcggctgcgaaatgcgcaagctgcggacagcgttctactcgtagcaggcgggcggcgcggagcgaacgaagcagcgggcggtgcggcccggtatttatagagcagcgcccgcgcgcgcccggctcgggccccgcccctcggcgccgcgcgccaatgcaccacttgcgcgggggtcggggga

SEQ ID NO: 76 - DNA, 26780 bp, Homo sapiens
tatttattttattcatttaaaaaatatatataagtagattatttgggtcaaggactgtaatatttgggtcaaggactgtaactcaggagcatggattcaagttgtcctaactatatgctccttattttattcttgcctatctgtagaaaagattctttttgcttgaactttgtgtcacattttattttcagatcttcattgtgtacttcattgcgggtgtgaaaaagctggatgcagactgggttgaaggctattccatggaatatttgtcccggcactggctcttcagtcccttcaagtgagtggcagtcatggtggaggcctctttgaggcatgggtacagagcaggtgactcatctctctcagtaatggcacctgttcctactttgcctgaatttgccacatgccttcctttgtccactcatttccctattcagcagaagcagagtcagtggtatcaaaagattgagccctagctgctcttgggagatatatggtatagataggcaagaaaggaaaagaaatttaaaaaggaaaggaaagagccggaactggctgacttggtgagtgagccagtgccctcagcagctgccttggatggtgcctgtgtccttgccttgccactctagcctcccatcagagccctgcagctgatgtactgagaagatgggcactcactgttcaggctctgacaaaaccattattatcacttccacaaaacaaagggtcacctttctgatttgtcttcttcccatttcttctttcctcttgttttactttattctctttcttcttccctgttattttccagttcctgaagtttgacttcattatgatgttagccaagcattcaccttttaaagtgtcctctcactcatgacctccgtggggaacgtcccttccacaacacacacacatctcagtcaaattttgtcctaggagatctgcccttgcttattacataggatatgttagaaaacattgaacacctaaagtgtgtgaaaatgtagagggggctgggcatggtggctcatgcctgtaatcccggcactttgggatgctggggtgggaggattgcttgagcccaggagttcaagaccagcctgagcaatataagacactgtctctacaaaaaaattttttaaaaaaacagctaggcgtggtggcacgtgcctgtggttccagctacttcggaggctgagacaggaggattgcttgagcccaggagtttgaggctacagtgcaccatgatcatgccattgccttccagcctaggcgacagagtgaaacttcgtttcaacaacaacaacaacaacaacaacaacaaacaacctagaggagtgtcttcatgggtggattatgtaccttaggcatctacccagccactggagtagccaaggcacattcgtgctgtgaatgtgctttgatgtgttctccagtgggctggtgcttgaactttctccatgtgtttgcagactgctgttgtctgaggagctgactagcctgctggtcgtgcactggggtgggctgctgcttgacctctcagctggtttcctgctcttttttgatgtctcaagatccattggcctgttctttgtgtcctacttccactgcatgaattcccagcttttcagcattggtcagtacctgtagcctgggaggaaacaggaaccacagttttgcaggaagggactagccagaggcattgtttgggagtgggagagggtggtgtgagcaggagctaaattgaacccagggcagtcactatgaagtaggcataaatggggataagaggactggggcttctgggctcagttagtatgttgtacagtagggaatctccaggaagaacaaatatcttacagttaagaactactttgtggccgggcttggtggctcaggtttgtaatcctagcactttgggaggccgaggtgggtggatcacctgaggtcaggagttcgagaccggcctgaccaacatggtgaaaccccgtctctactaaaaatacaaaaacttagctgagcatggtggcgcatgcctgtaattccagctacttgggaggctgaggcaagagaatcgcttgaacccaggaggcagaggttgcagtgagctgagatcacgccactgcactccagcctgggcgacagagaaagactgtctcaaaaaaaaaagaagaactactttccttttcagtggaacacctgggagaagtctcctaagggaacggggttgaagaggcccagccaaactcctgaaatatgtattttctccctgctttcctaggtatgttctcctacgtcatgctggccagcagccctctcttctgctcccctgagtggcctcggaagctggtgtcctactgcccccgaaggttgcaacaactgttgcccctcaaggcagcccctcagcccagtgtttcctgtgtgtataagaggagccggggcaaaagtggccagaagccagggctgcgccatcagctgggagctgccttcaccctgctctacctcctggagcagctattcctgccctattctcattttctcacccaggtttgtaggggctgtggagtgtacagcaaaggctggacttagaaaggaacggatgacaatagttgggaaagaatggggctggttttgcagccccttcttggtaggggatggggtcagtgtgagaagcattgagctgattcccctctgtgctgccttcccagggctataacaactggacaaatgggctgtatggctattcctgggacatgatggtgcactcccgctcccaccagcacgtgaagatcacctaccgtgatggccgcactggcgaactgggctaccttaaccctggggtgagatgtctgatgctgacaatttactgttcttcagagcccccttgtgctttggggtctggttttgtcttacacacaccataaagcaaaacaaatttgagtctgctttgccttttctcaagagccagattgaactatcttttatgtgggttgagatagggcaatgcattcatttccttgaactgagattagattcaggaaaagtaagcaccactagcccaacaatgaaaaattcattcccaaaggcaagttccatttttttctagccagaatgggcagcaggcagggatctcgttgtgccattggcagtgcatgacatgtcttggaagttgataatgatgaggtgggactaatatgggggtttggggcaggtatttacacagagtcggcgatggaaggatcatgcagacatgctgaagcaatatgccacttgcctgagccgcctgcttcccaagtataatgtcactgagccccagatctactttgatatttgggtctccatcaatgaccgcttccagcagaggtgggcaaggggagcagagagtgggaaaaaatgaagcacagttctttttaccaagatgaacagcccttgcttcctggtattgtcttgcttaaaaagctgtccttcctctagtgcatgtcccccttgatctggttgtgggcatagctggttgcttccagcagggggcaccatcatccaggagaaaagtgagttgacttgttcttttagacactgttgacataataccttctcaggtagctactaacccccattatacccagtgctccagatctcttctgccttctttctctgccctggactggcaataacatgctgacacaggccatttcttcttctattccctgtccttaggaatgatgatgaaagggagagaactggaagttctggtgggtgggtggctgtgatgtccttagaacatggttttctttcctaaggatttttgaccctcgtgtggacatcgtgcaggccgcttggtcaccctttcagcgcacatcctgggtgcaaccactcttgatggacctgtctccctggagggccaagttacaggaaatcaagagcagcctagacaaccacactgaggtggtcttcattgcagatttccctggtatggaggaaagtgaggagaggcttttctgtctttccttctggcttccttggccagggacattccatgtggtgggaggggagagggaatgtttttgaaacctaaggggatgatggtggtaaaggtgtgatgtctctgttctggctgggagtgagttcactctgccatggggtgggatgatgaactctgttggtctggcaggactgcacttggagaattttgtgagtgaagacctgggcaacactagcatccagctgctgcagggggaagtgactgtggagcttgtggcagaacagaagaaccagactcttcgagagggagaaaaaatgcaggtattttgctgggattaacaacagcagaaagaactgagtgcagtagctcacaccagtaatcccagcttcttaggaggctgaggtgggaagccaggaattcacagtgagcctgagcaacagagtgagaccccatctctaacaatttaaaaaacaatggcagaaagcttagatgagcaagattcacttattatagactgaaaatattttaccatagcagtaatgcagtggagctcaaaaaacaagggcccctgggactgtgaagagcctcatccaggattctagaggtccgttactttcgattccaaaacacaattgagtagaaagaagccaagagtcatagagtagggaggccataagctggctagagaaaagctgatgaaatttatccatttcttctcccttgtcagttgcctgctggtgagtaccataaggtgtatacgacatcacctagcccttcttgctacatgtacgtctatgtcaacactacagagcttgcactggagcaagacctggcatatctgcaagaattaaaggaaaaggtggagaatggaagtggtgagtgtatgaacatttgggctgagatagcctctggtttcaagaagtcagggttatgaatgatgttctagccattcaagaatgaacttgaagtctctagctggcagaagaggagttctaaggggagagagtgatccatctcagtgattcctcttttttctgtcttccgggcagaaacagggcctctacccccagagctgcagcctctgttggaaggggaagtaaaagggggccctgagccaacacctctggttcagacctttcttagacgccaacaaaggctccaggagattgaacgccggcgaaatactcctttccatgagcgattcttccgcttcttgttgcgaaagctctatgtctttcgccgcaggtaagttcacaacaatatttgtcattgccatcatatgttggcaagcttggtaactttcccctggggagagtaactctagagactgtcatacaggaaaggacagtttagctctaggtatcttttcctgccattcttcttgatttactggaagaataagtggcctatatctgatggcctgctttcttgttctgcctcagcttatctccagcctctctgtgggctgttcctaccctatcctggaatcctctaccagactgtataaagagtggtgtacccttccagctgggagatggagggtcacttggggggagattcccatatatgcctgtgtgggaggagtgaggaccaggtgccttctaagggctttagctgaaattcttctggtgaaacaggagtttgaacttggtcggctttttcctgtttttcagcttcctgatgacttgtatctcacttcgaaatctgatattaggccgtccttccctggagcagctggcccaggaggtgacttatgcaaacttgagaccctttgaggcagttggagaactgaatccctcaaacacggattcttcacattctaatcctcctgagtcaaatcctgatcctgtccactcagagttctgaagggggccagatgttgggtgcagatgtagaagcagccagtcacagacccattctatgcaatggacatttatttgaaaaaaattctcaaaagttttttttttttttttgggggggcggggttctaaagctgtttttaactccgagattacaacttagaggaaccaaggaaataaagcaaataagatttaacaacccaagattaagaggccaggaagaggttagacgcaatgtgaaactgtcctcctaggataaggtttaaagtggctttttgggggctgggtgccgtggctcacgcctgtaatcccagcattttgggaggctgaggtgggcagatcacttgaggccaggagttcgagaccagcctggccaacatggcaaaaccccttctctactaaaaatacaaaaattagccagacgtggtggtgggtgcctgtaatccaactacccaggaggctgaggcatgagaatcgcttgggcccaggaggtggaggttgcagtgagccgagatcgagccactgcactcctgggcaacagagcaagacttcgtctcaaaataaataaataaagtggctcttggggaaaagcaatttaatgtaccacgatgaatagctaactgttcccaagtgtttgctatgtgcaacacaccgcgtgagcagtgttacctgcattattacattaggctgagaggtaaaataatttgcccgaagacatacagctagtgacgaatggactgatggtttgaacttaacgtctatttgacttaaggtcctgcaccctgccacttgtaattttcagaatcactgataatctgaaataatgcagcttaaaacatgttttcttaattaaaagtataattggatggtggtcaggttgtaaatgcacacaaagtaatttatcttcattgcaattttggttccttctttgttcctattatctatatacacccagtgtttcactagcagttatgagagcagtcagaatagcagcatcaaagttaaataaggaaatctagatgattgctagattttctctaaaaataagcttagtatttggtattattctagcctttggtgagcagaaggggaggtaaagtaagaattaactaaatttagtaagggattagggaatgcttagacattttgtaggttggggtatacaagggtaactcaggaagctcctcagttcagtgaaaattcaaagggttggcactgagctaggaagcgagaatgcagggttatgaaaaaggatccctgctttgggagctcatggacttgtagcagagaccggtagtaaattggcagtctcagtaacttctgtaaatgattgcatctctttgcaggcttctcttcccatactctcccccactcctccttggacagtgttccgggggttctttcctaagcaactgctttttcagtatacatacttcagatgattgtgtctactccaggatttccaacgatgctaggtttctttcctgtgccctagacgtataggtctaagttccacctggatatcccacagggctatcaagctcagttcatcctaaacagaacttacattcatccccaactcagacttccttattctttattattgaatggcagctctgtaccttagccaagctgttatctctaggtcatcagccttgactcttcctttttccttgcatttcttaaaattgccaagtcccatcaattttacctcctggatacctcttgaatctatttttttttaaagacagggtttcactctatcacccaggctggagttcagtggcacaatcttggcttactgcagccaccacctcctgggtttaaacgattcttccacttcagcctcccatgtagctgggactacaggtgcccaccaccacgcccaactaatttttgtatttttagtagagacatggtttcccacattggccaggctggtctcaaactcatgaccttaagtatccacctgccttggcctcccaaagggctgggattacaggtgtgagccaccgtgcccagccaaatctgttttcattactacctatatctgtattttcaacctttgtattagcatctagttagggatagaccaggacagggccgacatgttagttgtcaagcagattgccaccctcccccaccactgaggaggccaaatggagtttggtggaaaatctctaattcattcaaggtattatatgggcaagcaatggctgtggcacagggtcccctgattactttgtaagaatgggtgggagggatgctgattttcaatccttttgcagatcttctctcatagtaacacaatagaagatactttgccactatgttgtttgccaaactcactgtacctacttgactggtaacaaaagtcccaagagttacttgggagaagacacttgaaaaagtatttttctaaatatgggcaaggatgctgcccttccccaaactgttagtataccacctctctgaccaattttcccaaggaagatattggggtagggtgaggtgtaaagaaaaagtggtcatgtaaatactggtaataaaagctgttcagtggggtagagttgggttgcaactgtagccattctaaaaatgggctatcaatgtccttttagccaaaagactttagtatacatcctcctcattctaccctcaggatttggatctttgcccctgatgggtatccatcccctttgaaactttagaaaggcaggttatatacagaatgttcaacctaaagacatttccttaagtcatactttcatgctttctaaactataatcacccttatcatcccctgctgttatgctttccctctgctccctgtggcctaatgttcctccaccaccttattaaccttcaggatacttttcccctaggctgggcaggacaacactatccccttggtccacaagctccctcaaggttggggaatctttgtttacttagcaaatactgaacataaccttaaagcggttacttttgaaaacttctcatgctattctaccaacttggaggcacctatccatgctcattcccctaatgtagccaatatggttatctgcaatgtattggcatctaaaaactcccttatgaaactgccagacttgttctggaacatttcaattacatgcaaaattcaggttctcaagttggaacaagtctaattgacacacctgcataggttttaaccttgccctccccctacttcccaacagatttccaagttttttgagaaggaaccttgctctggcccaggctggagtgcaatggcgccatctcggctcactgcaacctctgcctcctgggttcaagtgattctccagcctcctgagtagctgggattacaagcacctgccaccacacccagcttttttgtatttttggtagagacggggtttcagtttgccaggctggtatcaaaccgtgacctcaggtgatccacccgcattagcctcccaaagtgctgggattacaggtgtaagctaccatacccagatttccacggctttttttttaagtctcactctgttaccctggccggagtgtggtggcacgatttcagctcactgcaagctccacctcccgggttcacgccattctcctgcctcggcctcctgagtagctgggactacaggtgcctggctaacttttttatatttttagtagagacagggtttcactgtgttagccaggatggtctcgtgatctgcatgccttggcctcccaaagtgctaggattataggctcacgcctatattactatatagtggcctatattacaggccactccgcctggcctccaaatttccaagtttttaagtctccatgcaaacaggcataagcaagcactccttggctctacatttgcaggacaagctggaccaccattcagatgttggtagaaatgtaatccaagtggctattctctatgcatgtagctcctaggttcaagagcagtgtggtctgcggattttctacacaacctgccataaatgaaatttaagcctttggaaatttatagcattttcagctaatttgcattatttatctctgcaagatattgactagaaatcacgtttcagaacttctcagatgaaaacatcatacaacccttaaaactaagctcataatttaaaaatgtatgcagattaataggcttaaattgccaggactttagatagacattaccacttccaggttaatacttttagcggtttttatgccttcaatggtttgaagccctcaaccttagttgaaaacttaaaaatggcattgaatggctgctgcaataaggacacatgaattttggcttaagtggactaggaggactaaatcttgcttaggcttttaaaaaatgcccacccactgggtctagggattgaggttattttcctgaattatggctaattatggattacaattcaaggttaaagatacacatatagtattctcaggttattcatatgatagcattttttaagagccaaagtctcagtcacccaggctggagtgcagtggcttgataatggttcgctacagcctccaacttctatgttaaagtgatcctcctacctcagcctttcaaagtgttgggattataggcacgtacctatggccccaaagcactttaacaaatgagtaacagacacagttaaggtagaacctagcattttatttagatcttcattaaactgttggaattgagaaccagacatacgtaataaacctccaaaaatagatcctgaaaggcactttctgcttagggcaagcagtcatggaataagcatgtaaacaagctggcttctctgtaccacaccagccaagtcagctttctccatggccagccgcaccagctctgccctcccttctgttaacaccagccagaccccctgtaggtctaacccaaggtttttctgtaggacaccttggcctacctgggaatgctggaaacatgttgttaaaggaatcatggtgttgagagaaaaaaaaaaaatcttttaaaagctgccatctgaggtgatggcttctctgtacttacgccataccccagaatacaataaataagcaattagaaaacgttcaagtatgaagggatttcctcctccccgccaaaagcactgctctctgaaggaagctggtttctctgtagctacaccagctgttcagaaagctcattggacctggttttgaaaataaaacaaagttaaaaccctgggaggagttattgtgcagtgtggagtactcaggctttcttataaagaaaaaaaaaagttatctggtaccaaagtgtgcaacctacagaccctcaggtactgccctgtgacttctctgtatgacatcacaaggctgccaagtgcctgtttttctagaactaggagttggtgaggtttggctagtgctgaaaccatgcataggattggtttactaaattaaaaccttattacgtacgtcctccaaaagacagctgaaagtggagagattttgatttggtgctgttagaggtggcaattaagagcataagcaccagggagatggtttaatggtaactgccttttttgatgtcaggctggagctccaactgggaacttgcgttacatgcaagattgattggatagggaacactccctgacaaagagctacataattagaaatggatcaagttacagggaggataaggggaaggcttcacattcataatagagctcaagacattacaaattcatgctgacagggctgtggcattgccagacagaggctataagtggaactacaagtactttacgtgcacatcacaaggacattttcagcatctggtggggaaagtcaatgcaattatgactttggagcgttgggtgatagggcacaaaggttcaatttcaaagcattatttactacagtgttgtttctaggcagttacatggatcacctatgctcactaaattcattataatggtgaacaaaacacctagggacagaatagcaagcccaacttacagtcccccacaaaagctaaaattcatgtcattgactagagtgactgcaactggtcaggagctgaaagaggacaggaaaatttaggaaggagggccctttccctcagagcttgaaggcttctctgtagcctacgccaacaagtctggggaaaaaaggctaacactttcaatatttaagctttttgggcacttcccatgggaagctgtccctaccaaagtggccataggctgcagtcctctgataaattggcttcttcagatccagatccctggaatatacaagtccgtaacttaatatgtagcattaaattaaaataaagcaaaacaatcagcaagactcattttcaagagctctggcaaatgagttctctgggatatgctaggaaaaaaatttgtggcaaaagtgttacttccctggtgtccaaactccttgcacagtccttattagtaactatagttgtttttccgtccctggctcaacaaatacgaaaacttgtcattattctgagaaatttcaattgtcaaaaagctcacctgagatcacacaatacttaccaaggtcccgccgcccacaccctaccatggtttttacattgcaacaaaccttgagcaacccactttatctctattttcttaacacccttaagtagaagagcacaaagctcaaatatcaaatctggaacattctctagagtggttagcctaagccatggagcaccgtaattttaaatttctcaaataactaagtcttcactaaggcagcagttcaaaactgttccaggaattaaaatatattcccatttgaggagtcttccttcacaccttcacctcctcagccttaagtatatacacacacacccaacaccctcaatacttgactagcaacaggctttaccatctttacctgacaatgaccccagggcggagatcgaaattcttcttcacaatctctaatagctctctctcactcttctgagaggtaccataatggaaaatggagatagataatggatgagaaactccaatagcataagagacctaaaaggattcaaatgtcgtaagaatcagtgattgcaaagacccatatacttgtataatacgttggtataaaacaagtagttaagtagattactactaaataccctcccacttacatgacttttaatcgttcgttatataaagagtgtatacctgaacaagaaccctccggcacagacctcctttaacaagggattttgccacccaacgagcagcataagcagctgaacggtcgaccttggtataatcctttcctgaaaaggcacctcctccatgagcaccccaaccgccataagtgtccacaatgattttgcgtccagtcaaaccagcatcaccctgaaattacaggatttaagttactttacgcctagtgctttccaagtggattaggttgcctattctgaattcattcagcaaatatcctccgatgattcacatgtaggtttcagaaagcctgaaaaaaatgtagtagccaaaattttaagtaaccatcaaaaatccagaaaaatgcaacaaaatgacattacctgaggcccaccaataacaaatctgccacttggctgtaggtggtagattgtatcctcatcaaggtatttcgcaggcacaactgctttgatgactttctcctttagggcatccctcatttcatcaagacaaacctcttcatcatgctgaacagatataacaattgtgtggactctgatgggaagcacagcacctcgatcctgcatatactgcacagtaaccttgaaggcaacacaggtcatcagaacatcataccaaacaataactttgtatttgtttctctacctgaagttacaatataggaaaacaaatgctattttttccagttagctattatcaaaattatggatcttctgtgctgatgtaataaatgagacaaccaagctttatgatcatcacttacttgagttttagaatcagggcgtaaccaaggcaaagtgccattacggcgtagttctgccagtttggcatttagcttgtgtgccaagacaatggttaaaggcatacactcctcagtttcatcagtggcatagccaaacattaagccctaaagaaagaaaagtcaccaatgtgatcaagctccagaatttaatgttagaagagattaaaacagcctctacaccaagatacctggtctccagcaccaatgtcttcttcatttctgtcaagatgaacaccttgagcaatatctggtgactgttgctccaaggctaccagcacgttacaagtcttgtagtcaaaacctataagcaaaaaacacaacatcttgtttacgtcctagaaatacctgctgtttacagcaattatctggaattctaaacactgctgaagaaatcaaatatacctaaaccatcggaccttttagagaatgaacagaatagggcttagtgtatagtaagatacaactggagtttaggattagcaggaacattctaggagtttcttcaaacctcacagctgttacctagaaaaaaatgagcaaaatcattaaaacacacctttggaagaatcatcatatccaatgtgtttaacagcttcacgaaccactttctggtagtcaacagcagctctggatgtaatttccccagcaagaaggatcattccagttttagcaacagtttctaataaaaagagacattcaactcaaacatcacttctataaaaataatttttatgctatctttccaccagttgataagcacattctgaacctaccacaagctactttggcatcaggatcctgctgaaggtgggcatcaaggacagcatcactgatttggtcacaaatcttatctggaaaagagaaattcctggctcagtttctttaactttaaacaaagtatgtatgtatgtatgcaagctccctccctgttactatctgtaaaatctttggagattttaaaaaacatgcttaatacatcttaattcattgtgtttgcactttcctcctaaaattcaaagtttgcattataaatctaatcaccagaaaggtgaactgttagtcctatatcctttaaagaacagaatttgccctatatcatattcacttccacaactgtaccaaacccctctgcacctgggagtctggtagaactgaggccacaggtaggccagtttccctaatcttaaggaacaccaattataatgagcaacaagataattcgattaaacaattaaatgaaaagcattttctgactaaaatggcaattatctgattttgctgttaggagttgcgcaggaaacaaaagctcaacagtgtagaagatgctcaaacgtattccgaatccatgtctccctgctttgtcatctattgttaggagggagaacaaatatctccctaattcaagttcgtttttctgaattttctataaccgcctaaaacagaatccaaacataatgtggaagccagactgcaggctctgaacttcggtctactactaactggtgtaacagctaaccttcagcactcatcaagatcctgggtttgtcctctcataccactaagttacttgtgggatttcatcatgggcacagtaaactgaccagaccctaaagccaccagatagataactactgcggtcatcctaagggcagaaacagccaaaagagccaaataatcatctttactagccgatatgctcaggctgagattttcagttcctggaaatatagctttactcctccttcacgtgccaattgatccccataatggcggttgagcggacaaagcctcaagtaaaaccctgcaccgaagactttaaatgcgaacccaaagcaatggcagctcctaattcatgcttcccatccttttcacaaggggtccaaataaggactgccttcttggacatgagctatatttagtcagaggccgtcaccttggaggcaaggccatatccgccgaagggcatgtgcgtattctccagtgtgtagtcaagacctaaccactgaggcagtggagccagacgacgtcccaaggcataggccccccacccctcaaactgagggccaggacagccggggaggctcacggctccccctcgcccagataccacatgcggcaaacacgtggtcgccgctgcaatgcggggcgcgcgctcccgagggccggacgcgagcacgcggggcgggtcgcccactccaggtttgtcagacggcagggccgggaggggttaacagtgccctcccttcccggccagaactcactagcgaccacagcccccgcccttcacgttttctggaaccttccgcatgcctaggcgcgcgaccgaatgaaaagggaggggggaagggaagggtggagaggggagggggaagaggagcggcggccacgcgccaggccctggcggcgccacgaggaaagcgcgcggtcgccgctcttccatcacccggcggacgaggacgacccgcgcgggccccaccaccggccggccgcagccagccggaccttggcgctgccttctgccccgccccacgcttcgcttcaggccgtcccctcacctgggtggccttccccgaccgactctgaggtgaaaaggaatgtgccctcctcgatgaacgcctcgtggaagccgttgagctgtccgttcatgttggtgtcggtgtgcggaagtggccttacgaaggagcagcggcgaggcggcagcggctgcgaaatgcgcaagctgcggacagcgttctactcgtagcaggcgggcggcgcggagcgaacgaagcagcgggcggtgcggcccggtatttatagagcagcgcccgcgcgcgcccggctcgggccccgcccctcggcgccgcgcgccaatgcaccacttgcgcgggggtcgggggaggaagggcagctcgccccgcggagtccgggctgaaccacactgcgcggccgcgggaggtgccgtggcaatccggccctccagagaccgttcagctatcttgagccgctagagctaggagaaaaatgcagacgcgaggagacgtgggggattgctcttccttgtttgatgtgggagaaaaagcgactggggcttgctggacccgctcccctgtgcggtgacatggcacctcccttccgaccgttggccgggatagctttcccggaggtcgcgtcccccagcggaggcggcgggaatcgcggaggttttgtgctgcggctggggtctttctggccgtcccgcctctagatgccgggtggcagggagccggtggcggtcggccatgtgaaggtggccatcttggccggccagcgagggctcctcacggccttccttcggcgtccctgcccggctcgttgccggccccgggatatctgaggggcgcaggcccaccttctagtcgtttcctggtgaatggctctgctgaagatggccggaaagcagattaatgaaggtgctgccatcgatttaaacaatcgccctcctgcccgctcccctgcgctaaagtttctgagggatcctcacccttcgtggttcgtggacttaaaagtggaggcagcgctccagcctttccctccagagagaaaggaggccgctcccaagtccgtccttgccccgtggccttcctgttcctttgaagggggggggaatcgatgtttcaatcctctgttcaggagaatatggaacgaacatttcttttttggtgggtgggggctattcgttcccttgaatgtgcttaagcagatctcttgacggcgtggaatgggctgtttcatgaagctttcactttaaaatgtccacctgcgtttgtcccagttttgcccaataaaggaattacagggaaaaagagcgaaacaaaacttgagccagcaaggagtatggagtcccgtttggagggagcccgccttgggggcgggggtctctgcagcctgttctggggctgggcctcggtgcaggtctggtcgggctggtggcctggtggccctgagcggagcgcgtgacaagaacgccgggtttaatgaggttctcagggaacggcctgctcctagcatgggatgtactttacgctggggaggtgaaggagacccctagtaacagtctccagctgcctactgctggcggcagtagaacaaggtgcattcccaagaacaatcctctccgtcggtgcaggaggaaaggtgggatttgctaaaggctcagtgggaaacaaaggaagcacttgggctgtgctgggggcatccacaaagaagataaagggctcctccccagactcagtgaccacatccacggtcgctcaaagcaggcagcaagaaaaggttcgaccacaaaagagacaataggtgatgatatttttattcgttgctttttacttttcaagctaacccttcatgggaaagtaactgtataagactattaaatttttttgttattttttaaaggagaatgccaatttattaacttacaatgtgtaataaaattgtcaactggaacaaaatgcgtgtgtaggctggtcagtgcattatctcccagcagaaaaatctatatgggaagccagaatataactagaaggttattttattagggagtcagaacaaggagcgtaaagtcaatgattggctcattaaatcctgatacccctgtgctaccaactccacagtggggctaggcctgccaaggagatgagatttagctgtacatagttgcttacctacttctctcacttgtgaatagtgtgtaggtgtaatacagtaagagtaggggtttggagtcacgacctctctatgcatcagtatcctcgttctgtaaaattggaatattaatagtacatcataggattgtttcaaggattcaaatagtgcaagtagagtctttagcacagtatctagtacataatttgttttaatgtaagctgtaaaaaaattaactatatttgctgtgaattacttttcagtggctttcaattgctgtcgggatacggactaaaatctctacatactcaaggccccagtgtgatttggctgctacttctgcaaccttaccttgtgccacactctcctttctgtgttctacttggattttttagttagtagcagttaattttattaatttcatagtatcaaaacaaaggaggacacattttcatttattttatattattcgtattgtcccttcctcccttccacaaatatttatgagcacatctgtgagtcagacccaggagcaaatgctataacaatcctggtctctgcccactcggcgctctaaatgtggggagatgcctggctaactccttatccttctcactccagctcagctaccacttcctggatgaagccttcatctacacagatttgtcacaggggcctgtgttttatttcatggcactaagtgcagtttcaaattatagatttggtgattatttgatgaatgtctccaattcccagttaggcttgtaagctccatgataatgagaaggtgggctgttttgctcaagctttgttactgaatgcctggcacacacaaggtgcttagaaatgttcaagagggagagacaagaaaagaagggaaggaaacggaaaatgaacgaatataaagatggcagaagggggcggggcacggtggctcacgcctgtaatcccagcactttgggaggccgaggcggggtggatcacgaggtcaggagatccagaccatcctggctaacacggtgaaatcccatctctactaaaaatacaaaaaattagctgggcgtggtggcgggcgcctgtaatcccagctacttgggaggctgaggcaggagaatgatgtgaacccgggaggtggagcttgcagtgagctgagaccgcactactgcactccagcctgggcgacggagcaagactccgtctcaaaaaaaaagatggcagaaggaagcagagaaatgagagactctggcgatcatgtgaaatcaatggaaagaggtcctgctttgttttagtcgtaagcattgtaattaataaaattaagacttctttgttaacagggaagcacatggccatcctgttctgacaggaataagatttctgatttcatagatgcgtgtcctaagggtgaactaaaccaggagaaattgttggtttatttcctgtttatcgttaatgaatttgttgaatgtgaagtgttgtaaagcacgtaggaaaaatctaatcactgcctaaaggcttcagatttctcaagccagagaacattaatgtagcagtaaccctacaaaaaaggcaaagttgggattggataaaaatggtatttgtgactcaaacagcaaataaaataactccttattagcctgtcagtcatggggagagttccagaaaacatttgcagtgcaagaagctgttgatgtggcaggagaaaagaggagggtgacagtagggatagcaaagagcaagtgaaggtgtggaggtgttgagaaggaggttcctaggctgtgtgtcttaagagcaccttctatgtgaagacagaccaagaagaaagaaatgtaggccacgtctccaaatttgtggcagttctttagggccaaagcttagatatctcggatggcctcagaggcaagctagttctagtgggatcagaaacaagtactatgtgaaccccctcattattaggctttttgtattttgtttttatttctatgtttttctcttttgatacttaaatctttttacagtcccaataaagaagtcctgaatggaagaatagatatggtacagtgaagaagacactgaaggagataataatatgatgacaatagctacactttattgtgacaggcactgttgtaatatctactactcacaacagctctatttctcttcctgttttacagatgaagaaactggcatgttattcgtccatgtcacacatcaaatcagtagtggagctagggccttgagcctggtctgacctctaaattcatgccccttcttatagccaaacaataaatactgcatactccctgaggtcgttaatattaacaatttggtttatatcctccctttcctttttctgtgaacacacacacgcacacatcttactattcagagaaacatggattttttttttcttaacaattttcatgactgtctctccaggatactatgtagagctgtaaatcatttccttctcttttactgtgggaaaatatatacaacataaaataggtagctcaccaaggagaaaatgcaaattgcaataaacatatgaaaaaaatgctcaacctcgttgatagatgtgatgttaatatatgtgtgaatttatatatgtttttatccatggttcctggctcataactcccatagcccttgttatacagtgtttcgttataatgttgagagtgttaggactcaggagcaggcctcaggaaacagaatctctctgactttttcctgcttctctttcacctgccccaaggcaggactctaatcttgccctgcccttctgatcatgggtcataagaccctcattccagagagggtcctaccccataccctgggacaaagaatgctgagaggactgggttcagagagtttctggagagctgaacaggtggaggctgacaggaaagtgaataagaactcatccacgtgccaggagggtggcacaccccaactccatggtaacagaagctcctacacttgggaccctcccagacctcaccctatgtatctcttcatctggctgtttgtttgtatcctttaaaataaccagtaaaaatgagcaagtgcttccctaagttctatgagccactctagcggaaaaaaaaaattttttttttttgagacagagttttgctcttccacccaggctggagtgaagtggcgagatctcagctcactgcagcctccacccctgagttcaagtgattctgctgcctcagcctacgagtagctgggattataggcgcctgccaccatgccctgctaatttttgtatttttagtagagaccgggttttgccatgttggccaggctggtcttgaattcctgacctcaggtaatctgcccacctccgcctcccaaagtgctgggattacaggtatgagccaccgtgcccggcacactctagcaaattaatcagacctaaagaggaggtggtaccatgactgtggtctgtatggatcttcacctttactctaggggcaggagatacgtgggaatgctgtcatctgctctccttgcaggtggtccggtagctgcacagacagtgacccttgctggacaagtacctggttgataaaattgctcaaaacctgcaaatatactacacatggtccactgctgtagtgaagtgccggccccctgtaccccagtgacttgaaactttttaaatatctgacaaaatctatggatctccctagaaatcacacacacacatggacaaacattttatgtataatttctgaaacttaaccatatattgcaagttaagaatccttgctagggccggtgcggtggctcacgcctgtaatcccagcactttgggcggccaaggtggatcacctgaggtcaggagtttgacaccagcctgaccaacatggtgaaaccccgtctctactaaaaatacaaaaattagctgggcatggtggtgcatgcctataattccagctactcagggggctgaggcaggagaatcacttgaacctgggaggcggaggttgcagtggagctgagatcacaccactgtactccagtctgtcgggacgacagagtgagactccgtctcaaaaaaaaatttttttttaaatcctttggtatctctcataaatttaaattcacattccctagtatctgcagtcccacctctagaaagctattctagtccaggcacggtggctcacgcctgtaattccagcactttgggtggccaaggtgggtggatcacttgaggtcaggagctcgggaccagcctggaccaacatggtgaaaccccgtctctactaaaaatacaagaattagctgggcgtggtggtggtgcctgtaatcccagatacttgggaggctgaggcaggagaatcacttgaaacccggaggtgaaggttgcagtgagccgagatcgtgccactgcgctctcgcctgaacaacaagagtgaaactctgtcaaaagataaagagagggagggagggagggaggagaaaagaggaggggaggggaggaaaggaaagcctggcgcggtggctcacgcctgtaatcccagcactttgggaggccaaggtgggtggatcgcgaggtcaagagattgagaccagcccggccaacatggtgaaaccccatctctactgaaaatacaaaaaattagccgggcgtggtggcacatgcctgtaatcccagctacttgggaggctgaggcaggagaatcgcttgaacctgggaggcagaggttgtggtgggctgattttgtgccattgtactccagcctgggcaacaagagcgaaactctgcctcaaaaaaaaaaaaaaaaaaacgaaaaaaacaaatttatatattttggatatggagtctcgttttgtcacccaggctggagtacagtggtgcaatctcagcttactgcaagctttgcctcccaggttcaagcgattttggtgcctcagcctcccaagtagctgggattacagacgcccggcaccacgaccgactaattttttgtatttttagtagagatggggtttcactatgttggccaggctggtctcaaacttctgatctcaagtgatctgctcgcctcagcctcacaaagtgctgggattacaggcatgagccaccatgcccagccacaggtgtatatttttttggttcatagaataaattctgggaatctgcacgccaaactttacaatgagtatctctgtgggtgggatttatacttttcctgtactaactcgtgtcatttgaaattgtaaaaatttgtaagaattatttcagcaagttaaccaaaaaagattagcagcaaatgtgagttatctctagggtatggagtgtggtgaataaacaggctataggagccaggcagtagtggttcattctagtgagctcccccagtgcaaggaaagcaggctttttttttttttttttttttgagacatggtctttctgtatgtagtgttgcaatcttggcttactgcaacctcctaggcttaagcaatcctcccacctcatcttgccaggtagctggaaccacaggtgcatgccaccacacctggctaatttttatattttttgtagatagggggtttcaccatattactcaggttggtctcgaacaactgagctcaggtgagctgcctacctcggcctcccaaagtgctgggactataggcatgagccatcatgcctggccaaagcaagcattttctatggcacaccttctatggggaagctcccaaataccaggtaacctgcctcagaggtgccatcaccactgcagagccctctgtgaaaagaaggacagccaacccatgcttcattgtgttcattcttctgaagtcatttgtcacctgatggaccactgaactttttattttataaatatgcaaagtatacacaatagacacccccacccccacacatatcgtggatactgtcacagtcccagcctaagcttcagtgtcctgagatactctatatgcaggggcaatactgtcctaggcattcctttagtttgagaatcttacttggagattggactacactcatggtgtctgcagtctggctgggccttgggaactacgtgtcataagttacctgatgggtagcccttgtgggcgtggcctggtgtgtacagactctgcgctctccctggaatcctgcccatgccaggcctactgctgccaccaacactggcactgccaggctctgccccttggcctcctgccatgatttttttttttttaagatggagtctctctctgttgcccaggctggagtgcagtggcgccatctcggctcactgcaagctctgcctcctgggttcacgccattctcctgcctcagcctcccgagtagctgggactacaggcgcccgccaccatgcctggctaattttttgtatttttagtagagacggggtttcaccatgttagccaggatggtctcgatctcctgacctcgtgatccactcgcctcagcctcccaaagtgctgggattataggtgtgagccaccgtgcccggcctgtgattttttttttgtgatggagtctcactctgtcacttaggctggagtacagtggtgcagtctcggctcactgcaacctctgcctcctgggttcaagcaattctcctgcctcagccttccgagtagctgggattacaggcacccaccaccatgccaggctaatttttgtattatttttaatagagatgggattttcccatgttggccagacaggtgaactccttacctcaggtgattgggctgccttggcctcccagagtgctaagattacaggcgtgagctactgcacccagcccatgatcttggtttcttagaaatgacaccaaaaacataagcagccaaagaaagatgagctaaattggatctcatcaaaattaaaaactgtgttaaaggacactgtcaagaaagtgaaaagacaacccacagaatgagagaaaatgttgacaaatcctgaatctaacaagggttaacaaggatgtggagaaattggaacacatgtacaccgctggtgggaatgtaaactggtgctgccgcattggaaaacagttctgtagtttctcaaaaagttcaacatagttactatatgacccagcaggcccactcctaggtgtatgctcaagagagctgcaacacatgtttacacaaaaacttgtacacaaatgttcatagcaacttttcattgtagtcaaaaggtagaagcaaccaaatgtccatcaactgatgaatggataaatataatgtggtatatccatataatggaatattatttggccatagaaaggaataaagtactgatacatgccacaacatgaatgaatcttttttttttctgagacagagtctccctctgttgcccaggctggagtgcactggcatgaacttggctcactgcaaaattctgcctcccgggttgaagcaattctcctgcctcagcctcccaagtagctgggattacaggtgcctgccaccatgcctggctagttttttgtatttttagtagagacggggtttcaccatgttggccaggctggtctggaactcctgacctccggtgatctacccgccttggcctcccaaagtgctgggattacaggcatgagccgccgtgcccggccaacatagatgaatcttgaagacattatgctaagtgaaagaaatcagtgacaaaaagcatacactgtatagttccatttgtatgaaatgtccaggctgggtgcagtagctcatcttgtcatcccagaacttcgggagaccaagatgggaggatcacttgaactcaggagtttgagtccagcctgggcaacatggtgagaacctgtctctacaaaaaatacacaaattagccagggatggttggcacacacctgtagtcccagctactagggaggctgaggtgggaggatcacctgagcctgggaggttgaggctgcagtgagctgtgattgtgccacagcactccagcctgggttacagagtgagaccctgtttcaaaaaaaaaggcagaataggcaaatcaaatccatagaaacaaaaagtagattcgtggtggccaggggctggtggaagaagggagtggagagtaactgctaatgggtatggagtttctttttggaaagataaaaatattctggaattagatagtggtaatggttacaaaacgctatgaatatactaaacatcactgatacacatcaaaaaggtgcgttttatggtatgtgaattatatctcaattacaaaaattgtcttttta

SEQ ID NO: 77 - DNA, 35873 bp, Homo sapiens
  misc_feature (1)...(35873): n = A,T,C or G
actgacacctacatgtgtctatttagaatggatgtcctctggtctctgccgtcttatttcaaataagtgttgatcagtcgggaaacacgtcttggacactgatttctggctagtacattgtgtacttgtatgcaggaaagcaaaaagtatctaatgaaagcagccctcctccggagtttgctgagccacaggaaccataagccaaatcccaggcgcttggatttcttaagaaacagccaagtctttgtgtctgcttctctggacccaccgcagccctggccagaggcaggcatggggcgccacgttgagagagcttcctagaggactcaccgttggccggtgcaggctgcaaaatgtgcgcagtggcggagagacgctcctccagccatgtgcacggcgacaatcccaggtagagctggaatgcaggctgccccgagatccccacctgctgacgcttccccggcaggaatcggttaaacggaacctctagtcatctcggttttagagcggtcttcacgccacagccctccgcgcccaggtcctccgaagttgggacaccgcccacgtttcccccgtgacgcgggcgcgggggctcgggagttgtagtctcgggcagggcgcgggcaccgaggccggggctgcgcggactccacgtcccggcgggcggcgcggcgaggcctggggcctccaggggcggggccgctcggccctttaaacctttcagggctgctccgagggccgcagctagagtcggcgccacgagggggccgagcagggtgcggcggcggcggggcgctccggggaggtgcgtactgggctccttcccttcctccgggcttccaggaatcacctggggactctcgcgtcccgggtcctggggggtcgccggccgcagggtccggccccagccggggtccccgcgcccaggcgagcgggggccgggccgggctgggctttccgcgtgaacccgcccctcgcccagggcgccgatggtcaggtggttgcctgcgcgccgccgactcgccaccgctccactgggccggcacccagcctctccttggcgtggcctcttcggttgtccagcccttctcccagccctggtccctcagaaggagggtaactcccttccagatgttacggtccgcctgcgtctctcagcacgccggtggcatttgggttgaccgcggaggcccccagtgccagagggtgttcacgttctgccgtgggctcagcccaaactttggacgctcagagacccaacgggagcgctggataaggtgttgacccccttcccctcccccttcccggccagttacccactcctggactttgatctctctccaccaggccaggacagctgatggttgtggcagaaacatctcaaggtagctggtccgcccccacttccccatctacctcttgtcctccccccaacaccaccaccaccctggctcccctccctcatgaccgcctggatcctcctgcctgtcagcctgtcagcgttctccatcactggcatatggactgtgtgagtaaaggggggtgcccggggggcaacaggagcttgatgacgcacacaaagtctcttgtcctgtcatagccacggtggtacccagggtcactctgggtgtctcaaaagcctgacttggtgcctgggcacacagccccttgggacaagctggcaccactgctgtccagcagggtggccctgacaaatatacttctagccagggcaatttccagagggcctgtagctgggggcatgctgcaggtgctggtgtggcatcaagccttagggacctcaacttgagtccccagcaacaataatgaggctgaatggggccagaaatcaaggttgaagagaagggtcatggggtgggttgagtggggctcgggaaggctgccagggtgacagttctgttcccacaggtatgccatggctgtgatgaaccaccatgtatgccctgtggagaactggtatgaaggactctgcagacaaccttgctctaaagcttccttcatctctgtcccctcttgggcctgaggctgccacgagccagactgcaaccctgagcctcactgctcttctctgaaattggtccccaggcatggcttcttgccacctacccacttcccactatccctttgcccctttggttactgcttcaggcgggcactggggagtgggatcttctgtccctgtaggggaggtctgggagagagtcctctttgaggcctgaggctataggccaagggcctgggggcagtcccttcccccagtctactccctgtcctgcctgccaggtcctacaacgagtcctgccctcctgaccctgctgagcaagggggtcccaagacctgctgcaccctggacgatgtccccctcatcaggtaaggcctggacattgggccggtcagggagatctaagggcctcccagacagcccctcaagcaaagagctgtccttgggtctcaggaacaataagtatcctaagagccacttaataacaacactacttgacagttactgtggggcaggcactctgctgagtgctttatatgcattgtctcttttcatcctcccaggagtgaggcaggtattgttttcaccattttataggtgaggaaacaggctcagtcttcctcatccaggtcacacagctaataagcggaggcacctggatttaagctggagccctcagattgcccagcccgtgttctggctcaaggatagccaaaccagccgcagggctcagcaaagagtgtcagggttgcccgaacactcctgggcactcccttctctctcacacacatgagctctgctttgggggcccagcctggaaccagttgttcatgagggaccctggatcttcacataaatcagtggcctgcctgctaaggagcaggtgcaggtaaagcaggggagagccagtgagccaaaatgggggccccccgggcctcctgcacccctcttactctgtccttccccctcctcgcagcaagtgtggctcctatcccccagaaagctgcctcttcagcctcattggcaacatgggtgctttcatgggtgagttgtacccttagccctgaccctgcgtgcccagcccagtgatccccacacagaaaggcccaggaagcccttctgtgcagccctccccaccaagggctaaggcaatagaggcagcttctccccttccttgaaggccaaaagctgactcccacacagccaccctgctggctggagcctgaggaaacctagttcaccacccgcctgtctgttcctttctgcccctcagaaggggcaggagcaccacagcgtctgggggaagctgacaggctcgctgggcagggccagggctggaggaaggcctcaactgtgctctcctcccccagtggccctgatctgcctcctgcgctacgggcagctcctggagcagagtcggcactcttgggttaacaccacggcactcatcacaggctgcaccaacgctgcgggcctcttggtggttggcaactttcaggtgcttccccttctcccctgcaaaccttaaactttacctaacaaggcctggctgcctgcagtgtggcacctcaaggttggggctggaaagagggagaggaaggaagagggagagaggagattcattgaaggaggggtggagaggtggggccatggccacatcaccaactggcccttctctgggcccaggtggatcatgccaggtctctgcactacgttggagctggcgtggccttccctgcggggctgctctttgtttgcctgcactgtgctctctcctaccaaggggccaccgccccgctggacctggctgtggcctatctgcgaagtgtgctggctgtcatcgcctttatcaccctggtcctcagtatcctttcaggacggggcagccaggaactcatcctctagctcaacctttctccctcccaagaggatggggggtggaggcctaacactgccatgtgggggagaggactaacacctctccctttggagaggtgaggcctgagactgcagaaggggtgttgccaggtttccgtatgtcctactgaacatttccttagcctcgttttaggtggagtcttctttgtccatgagagttctcagctgcaacatggggcagccctgtgtgagtgggtgtgtgtcatcgatatcctcattttctatggcaccttcagctacgagtttggggcagtctcctcagacacactggtggctgcactgcagcctacccctggccgggcctgcaagtcctccgggagcagcagcacctccacccacctcaactgtgcccccgagagcatcgctatgatctaaggtctggggagggtggctggcccggcctccacagcaccccaccccatatcttctttccatttatttcgtaccaaaaacaattttgagaaagtattctgttgggatctgggcttcctcacttctggagaagtggccatcccatgcccacctgtgccatggaggagtgggccctgccagctgccacagctgcatgacctgcttccccaccccacggtgtcgttttgtttttaaaggtcacctgtcctcactcacccagccagcccttcaggtgccttctactcccagtgccaaagccagaccactggggtttcctgctgcaggaattgggggctgggaacagcagaggggatagaagtctggtggaggtggagtgggcacgccttagcctacggaaaggcccatttctgggcccactgagctgcactgggattcttcactctgcccctcacttcctttagggcaaataacacagcagaaccacgtgggtattttagtacttttttttatattaaaagaattctaatttgcatgtttgtagcctgttctggagagttggggggcctgatctgggatggctttccataagccaaggatgggaggaagcccttgccccccaggagtgctgagtgcactctgttgccagaaacaaaggatgccaggtgccacccaaataccccttcaaagggcttgaaacccttctgggcctctaagcaatctaaagaactaacttggtctgataatctcacccatcccccactcagagtctggtttgaactttgattccttaggaggcatggggggaaggtgggggtggtacagagagcaactttaaaatattaaaagtggctttctcaatggagcaaaaagaaaacctgtgggattacaaagttaactagacattgcagtgggaggagggtgcaggctagtttatcagctttttttttttttttttttgagacggagttttgctcttgttgcccaggctagagtgcaatggcatgatctcagctcactgcaacttctgcctcccaggttcaagcaattctcctgcctcagcctcccaagtagctgggattacaggtgcgtgccaccatgcccagctaatgtttgtatttttagtagaaacggggtttcaccatgttggtcaggaaggtctcgaactcctgacctcgtgatccacctgtcttggcctcccaaactgctggcattacagacatgagccactgcacccagcctagtttatcagctttaagtaattaactgggtaccagaccctgacacattttgccttccaaccatgaacacataggcccaagccctggctattgcagtaatccagttctttaccactgccatgagtccagatgggccagcagggaggaaaaccgcagcctggtgccttctgcgatttaggatcaccttccccaacagaagtagagacctgatggaggatgcagagcccctggccaggtctgtgatcaatacagcctcagggtgggtaaagaaacctttaatgaggattcaaggttaataaggaagacgcagagggccagcactcagccccaacctcctcacgtgtacatggctccatggaggttctccagtcggtgttgctgctgctgttttcgagcctgaaggaaagaaggcatgctgggcaggggccaaaactgaaggcctatgggtgaggggatgggcagctattatggggctggctctgttttcaggcctctggcgtctgcattgctgaggctctcaccacaaatcaaagtcactaagaagacagccagagccagggattctgaggcctacccagtcctgctgaggtgggaagtgatggcagcggggacaggactcagggagcccattacgacccctccacttaagcatcagcccctaccttatctcgtctgtgctcctcataagtgtcgtcatcagtgggcagctcatagcggcacaagggacaggaatttgtctgagaaaagtagagtagtgttctagccttggtctgatcttcataagctgataaccaccctcccctgctcccaactgccactcttcttccatcccccagcagtccatgaacagaaagaagcttgagtactgggcccagggcacggtgagagctagaagaagagaagcagtaccttgcttagccagggcagaatgcagctggaatggaaaaggtgatggcaaggcatctcaatggcagtctcctcctcctcaaattccaaaagacacacggggcacttgagctctttaggaaggagtgctgatcaggagagctgctacaggctctgcctcccaagctcccactcctgaaggacacttgcccccacctgacctggaaaactgaaggaccagaccacagtctggcttggggaaggggtgggtctggcccaaatagcagaaagaatcagtgtcctcaccagcctgagagcctctgatgactgtcctggggaggttctcaaccacagtcttggcagctggtggaggcaggtggtggtcccaatctactaccaaccccaagtcttcaaagtccatcctattgaaaagtgacctggggaaggggatgtaaagtcagaacaaaggaaaactatgctttttctttgtccccataatccactggacattaataaacacgctgcccagctagtaggaataatagctacccttagtagttagtagatgctcactagataaaaagcacgatgggaaatagtttacaactgctatcagaccgccccagcacgtaaagtgtttattcccattttacacatgaggcaacagattcagagaagttactcaggctacgctgaataacctggtagagcccagattccaagaccaagccagattccaggtccagtaacagcagtgcctgctgttactgatgaatatacccactcacagcacacggccccaaccccgcccccatgcctcaccttctctgagacctcccagagcctgctgtccttccgcccccacgcccaccactctccagctccaatctttcccgcaatccccttgccccaggccggcccaacggacggcccaaattatcgagatgctcatccccacacccctcagtctcgccgcccgtactaacactccagattactcatctgtcctccccagaatccgctgcccctggtaatccgccttctccagccagccccagcccagaaacctgctggttggaccctatccccaagccccgcgcacccaccttgcgagctccagcagcatgttggttcgcgtctcctgctcagggtccgacggctcgcagtcgtgttcatcgaaataggacgccatggctgcccagccttctgacacagccctcggaccctgctcgatagcggcctagcggcgctggccaataaactgacgagctgagagaggctggccaatcagagtatccgagggacgggcatagtggctcgttaaacagcacggaaagcggaagtactaattcggccccctctcattggcttgaacaagtcaggtgaccagagactaacgccaatgatggagatctggctggtgaggaatcatttgttttggagtcggagccaagactgaattcccggggatttctggcgcgatcgcgtccaagtgtctggtgtgtaaggctcttcagtctgccctgaagctcagagggcttcgacagtacagatgctagaggcctctgcgagcaaaggcggcgctggcccaggggttcaggttcctgcgagcgttggcccatggcgcttccggatgcgctgtccggatccccgccggacacttctgcccccgcggccctctagttggttcaccagtttgcgtttgattcctgcgcatttcttatgtgttaggcataataataaagggtggggcaagcctccccaactgagagagatctctttgccggagaacctggggcctcaaccagctcatgggactgttaccttcagcccgttgctatccctagcttctgtaaaactgctggcttgtactaagaccttttcattcctggctacacatgaattcccagaggagagaatgggcgcggaggagctttagaaacacccgtgtctgataccttcgaagattctgatttaactgatctgtggtggggcctgggcaatggcacttgtataaattatgcaggtgaagcaggtttaagaaccactgcactcaatgatttggatgataggtactatttagcatctagaactgttagtctgatgtatgttttacacgctcgatcatcccctcaatagacccaggagctaagcgtcattatgccctttttacctcagaagtggcttgcccaaatttgcagtctgtaagtggtgttgcagaccagctgcagggccaagtgctttcctccatctttcccaagagaggaagacgctaatgcgctcagtaaaactaacacgctctgtaaggggtgaagctccacacaactcaggcttattctggtttctgtcagtagcgctcactttacccagcaaggaactgcttattttacacacttgaccctgaattccccttgccactcacacctgagtttgaactgcagctaagtagcccaggcagaggctgccctgtttccacagtcttggtgtggctttatttccttcttccatgcctttgcccaatgatctttgctatggccctgaaggcactgcctccctggcctatatggccctgtagctttgaaaagcctgaattcaggctggacatggtggctcacgcctgcaatcccagcactaaaggcaagagaattgcttgagcccaggagttcgagaccagcctcggcaacatagaccccgtcgaaagagggagggagagaagacacaggagagaccccgtcgaaaaaggaaggaagggagggagggagatgggaataccaaggagtgctttaaggtccccatctcttgctgtcacttcccccatctgcagtctgatgtaaagcttgaggtagatagaatgtggaaagagaaattgaggagtgggaagtgttcagaggggaaaccatttatctgaaggtgagagccttatgaaaaattttttgggccaggcgcggtggctcatgcctgcaattctagcacttcggaaggccgaggcaggtggatcacctgaggtgaagagttcaagaccagcttggccaacatggtgaaaccttgtctctactaaaaatacaaaaattagccaggtgtgatggtgggcacctgtaatcccagctacttgggaggctgaggcaggagaattgcttgaacccaggaggtggagtttgcagtgagctgagatagtgccattgcactccagcctgagcaacagagcaaaaactctgtctcaaaaaaaaaaaaaaaaaattggtgaagtgctttcttctttgtcatcgcatctacagtctcattggtcctctaagcatccccaagatgacagaaaaataatagatttcattctcagagaaacaggctcagatggggaggactggttcaagggtctgctttgggggccattgtgttcttgcatccacactccctgtctgtgtcgggctggatcaagtagggaagggagaggaaggagccatctcccaggggtggagtcctttgggtgatgggctttttaagcagccctaggggtagagacagatgggattaaccaacctggggaccttcacacacagataccagcttttaatcaaacagcagtttttactgagctccaggtggggctggcccagcatggccagtacagcaggctgccctcaagggccagtctgtggcatgacaggaaatgcaggggtgcacatgttggggctgccctttggcactcactggggtgggtcaagggagagcaaacaccaaggtcctctggagaccagaatcggccagtgcagccatttggcttctccttcaggaccagctgggtcagttcccaggccctgaggcaatgcctgcatcctgggtccgtggggcactactgctgtcactgctctgagggagaaagacgaccagcagcacaatcaggatgatgagcaggacaccaaccaccaccagccccacgcagatccggtaacggatgttctcccagcacttcttctgggccaggttctgtgtagtcttgttgaaggttgagctctgcggatacccccagacacaaagtgggagttagctggcaccctcttggcctgggagccagctcctcccaaccccatctcagtaaggcttagtctcctcctgcatcctccccatcttgtctactttctttcttttttttttttttttgagaaggagtctctccctgtcacccaggctggagtacagtggcacaatctcagctcactgcaacctctgcctcccgggttcaagcaattctcctgtctcagcctccctagtagctgggactacaggtgcacaccactgcgcccggctaatttttgtatttttagttgagatggggtttcaccatactggctaggatagtcttgaactcctgaccttgtgatctgcccacctcggcctcccaaagtgttgggattacaggcgtgagacaccgcgcccggccttgtctgctctctttctataccacctgccgtggaaccctcccagcctgactcatctcaaacaccggtgtggcccttgactttcagccctagtgtctcaccctcagttaacaatgccagtactcaggctggacacagtggctcatgcctgtaatcccagcacattggaaagccaaggtgggaggatctcttggatccaggagttcaagaccagcctgggcaacatggtgagacctcatctctacaaaaaatcaaaaattagacaggcatggtggtgcaggcttgtagtcctagctcttcaggaggctgaggcaggaggatcacttaagcctgggaggtagaggctgcagcaaatatgattgtgccactgtactagcctgggcgacagagtgagactctgtctcaaagtaaaaaagaaacaaaaaacgataccagttttctacctttaagaaggtccacagcttcaaaccaaggccttcttatcttgtggggtctatctgttgcatgtctaggctatgggtgcctgaggaaacccagaggccccacactggccctcaagaaggcctcaaccccaccaaggaactggagatcctgaatacagcccaagagagactttcccaatcctctcccctcccctccatgctcccccaggcctcacaccatatccaggagttggtctgaacgctgctgcagttcggccagcttcacaccacgctccaggaccttgccgaagttgttacgcataatttccgtcacctcgttcgcctgctgctggcaccgctccaactctattcctgcctggacaccaagcccgaggtcagggctgcatgaggcccccacctggccctcatctgcccctgagatctagaagcctccttctccccctgtaggtgggtacagcatgagagtaacagcatccttcgtgtaagggtatgatgtgtgcggagtgaaggtctggccttcggggtgagtgcggcacaccttaagtctcacaggctcctccccttgcacgtcaaggcagggcctaggacctaggtaagtcccggcttccagcacctcagcttcctctaagctgtcccaaggtgggatcttcccaggaccccaccctcccacaaagctgattcttttctcacctgctccagaatggcgtctacccaatcaatgcacagctgccctaaggtttcccactggcctaagaaggcagcaaagaatgggtaaccaagctacctggctggaacacacagggaggagacctaccctacaggctagaaaggtaattttgaagcagcacacatcatagtctctgcctaacccctctatccccaaactgagaagctcagatcttcctctttgggcctctgactggtcaggccagttctgcctcctggcctgatcctgctccctatatcactgctccaacttccctctccgtctgggaacctcagtggtaccggtttttggcctccagccttccactcagctggggtcctcactggggtccaacttacagagatgagactaactcttggatttcccagcctggggggcagctttgcctaacagaaaacaccagctcatttcagaggactgggaagggaggtcttggatccaagctggggaaggttgaaatgacaggggagagagaaagtctgggtcatgtgcaagaaaggcactgggctttgggtgcacgtaacagagagagacaccaggcaggaggccctggtataagccagaagcctaggagcagggacatttcagggagatgaataccagtggattagcaaaccacagaaactccttcctcttagcctacttccccacagcccatccctgttcccttcccctccttacaagaagggcaagcttcttttcctgccagcccacgtcacccattgtctacaacagacattttggcacttgactgaattccacttaaaaccagaaaacttaagtgttagaagagatctggtggtcacagagggctacctcccactcagccaagaatcctccttcaggatccttgcagctgcttggtatacagcctccaagaattcccactgtatgagtcctatctccccagctggaccacaaactcccagagggagggcagggagcagtgccctgcctttgtccaccaccatcccaccgggaggccagcacagtgctgaccattgcaagcaaggaatcagtgagtgggccaattacgatacagcctaaccaaaagcaattcttattctcaagagatgttctcccagcatgtttttctagccctgcatgagtttcgaggggcaggcatttgaaacccaaataggtcaatatttacccatgagctagaaaagcaacctgcttcaagagaggtcaggcaaaccactgtaggggaggctgcgctcacaggctggaggaagcagtaagcaggaaacacagaggaacaacgaagagagcagggaaactgcactctcaccttttcctgagtcaaccgtcatcactattattactactatagcattcaacaaggctccatcattcaatcctttgaacttccccacattcaaatactccaaggcaggctgggcgcagtggctcacacctgtaatcccagcactttgggagccccaggcaggcagatcacttgaggccaggagttcgagaccagcctggccaacatggtgaaaccctgtctctactaaaaatacaaaaattagccaggcatggtggtgcatgcctgtaatcccagctacttgggaggctgagatgggagaatcgcttgaacctgggtggcggaggttgcagtgagccgagatcacaccactgcactccagcctgggcaacagagcaagactccatctcagcaaacaaaacaaaacaaaaaacaaaattaaatagtccaaagcaaaaacttgagaatggataaatactcgaaaataagagtcactgctagagactgggaaaatgctggatattatctttttattttctattctaaatgctacagctgttgttaccttatttttcaacaaggggtgatatttgggtcacattctccaaagagctggctgtgcttccagctgtaatctggaccagtctcccccaatgcgaagccaggcctgcctggagccaagatggacccaggcctaaaagaacacattcgctccagggaacacagaggccttagactcaagtctcgggccctccttggcccccactcaaccagaggaaaaaggacactgactatatacacaggtctctgctggcactgtgagaaataaagctccagggaccctggaaggaggtaagcaagaggacaagggccacactgccttacgccacactgtcactcagcataatgtctgcagacagcagagatgtgataaacagttcctgaataaatggtgcctatatttttaaagatggggtcttgctatgttgcccaggatggtcttgaactcctgggctcaagcagtcctcccacctcagcttcccaaagtgctgggattataggcatgagccatcatgcctggcctaattgtgcctattcttaaagagaccactttgccctggggaaaagacacatgtaatacaattagagaagagtaaagagttacactgtgcgatacagatagtaagtatcagagctgccacagagagggtgccatggtgggggcgggtgaccccttgaaggatgacatggagcagggacattcttgcactgagagatagggatacaccctgacagtgaggaccaggcagaggatgggagggatggggcaggacagaaggcagaaaaggtcaggtagagaagactggctccaagcgactgataaaacttaagagctagtgtggtttttgagccacgggtgacagtgaagaagtgcttcaggataatttctctattggtggtagacaggcacagatagaagtaagaaaatggcagagaggccagccagaggggtggagaagtaccatcagcaagactgccaggagatggccaccaggcgggagaggggtgacaagcagagcgtggagaaaggaagaagggtgagacaggcatttctgagacctgaggccagaagcctgcagggcttggaattttgagccagggcgagaggggagcagttgtgtaattgccagagagtggcagttacacaggaaatgttcttgacagactgttgccccctgtacagaatatcccctctatgacactcaaacctctcaggtttttctgggctcaatctctttgattcctcctatgaaaacgcagttctcaaaaccacaccatctgggccaggcacggtggctcatgcctgtaatccctggactttgggaggccaaggtgggcagatcatgcctctaccaagaaatacataaattagccaggcaaagtggtgcctgcccatagtcccagctactcgggaggctgaggcaggagaattgcttgaacctaggaggcagaggctgcagtgagccaagattgcgcactgcactccagcctgggcaaaggagtgagaccctgtctcaagaaaaaacaaagaaacaaaaacaaaaaaacctccctatcctaactctccttgtctccccatctcctgtctagtatccaagaaactgttctaactgtcgtcagatgaatgggcgcaagtaccggtataacattgcctccctaagtcggcactcagctcagagactaggagcagggctctgctttgcacccgtctgttgaaatcctgcttctgccactcaccagctgagtgactgagactgaggatatgacctttctgacctccacttcctcttctgtaaagtgctgataataatgttagctaaggattatgtgacttattgtaaatcaaaagcttagcacaacgcctgacacatactaaatgctcaataaataagagctattatattgatgtggcccacatttccctagctcctttttttttttttagcagtcagatctcaagaattgtacaatatggccaggtgtggtggctcacgcctgtaatcccagcactttgggaggccgaggcaggtggatcacaaggtcaggagtctgagaccagtctggccaatatggtgaagccctgtctctactaaaaatacaaaaattagccaggcgtggtggcgggcacctgtaatcccagctactcgggaggctgaggcaggaggatcacttaaacctgagaggcagaggttgcagtgaactaagggccactgcactccagcctgggcgacagagcgagattctgtctcaaaaaaaaaaaaaattgtgtaatacaggtggtcagtaaaacctcttcgttttataaaatgcacagccaagcaagctcttccctatggcaaacttgtacacatagtacacataattgtttctaacctgtggctcagaactttaaatgggcttttggtaacttggtaactagcatctagtttattttctttctttttttttttgagatggtgtctcactctgtcgcccaggctggagtgcagtggcgtgatctccactcactgcaagctctgcctcctgggttcacgccattctcctgcctcagcctccagggtagctgggactacaggcgcctgccaccacgcccagctaattttttgtatttttagtagagacagggtttcaccgtgttagccagggtggtctcgaactcctgacctcgtgatccacctggcttggcctctctctcaaagtgctgggattacaggcgtgagccaccgcgcccggctgcatctagtttattttcatctggcacggcaggctgttgaggttttacatcttgagcaagaataacagccaccatccaatgggcacatactctgaggtaggcactatgctgcttgctgttcatttgctctgtctcatttaatcctcacccaacaacccattgaaggccatattattaacccagttattttgtttgtttgtttgtttgtttttgttctgagacagccttactctgtcacccaggctggagtgcaatggcgcgatctcagctcactgcaacctccgcctcccaggttcaagcgattctcctgcctcaacctcccgcatagttgggactacaggcgtgtgccaccacacccggctatttttttatatttttagtagagacgggatttcaccatgtttgccaggctggtcttgaactgttgaactcgtgatctgcccgcctcggcctcccaaagtgctgggattacaggtgtgagccactgcgcctggccttttcccagttttataggaaactttggctcagaggtgttaaatcacctgtccaagatcacagagccagtgagtagaagatctgggagttgaaccaacacagactccaggcaccacatttgtaacccgtgtgctaaattagatgcaggtacaaggaggtcagacactttagctgattggctaaagaatctggttgatgctaccaacctaatttgtgtgcatatgagggaggcctgtggctcaacacacacattctttggagagaggatcatctacaagattaatgaattcaagtaattattcattccatttccatctttcccatcactgctttgttcctgctctgtcccctatacttgtcaccatgctggcatgaaggacatttccaagaaatccttgttggttgaatgagtcatagagaagaaaagaaaagtgaaaggaagaaggaccagggagggaaaggggatgggtggaaggaaggaaagcgctaaaggggcaagagtgaaagaagaaacaggaagaggctaggagatggatgggtggaggagcgacctccccagcctctcctccacagactgcctcaaatgtacccgtgagaatccccaggtttcccagtatcctcctcccccaataaaatatcctgccttcagccttcacttcaggagcttctcccaaagagctaagggccggctgaagcccacccctacccctgcctgaccccttgccctgcacacccttaagtgggctctgggctctgccctattctcagagccttcctcagcttcctggcctggcctcagagctcagtgctaccttcctgccccacttcctcttcctgcctccaagttccctggagataaggccatccaggcattgacccctagccaggccacatccatcacacctctgtcagtttctccaaggcaaaatcttaaagcaccaagcctacttcctgcccagtccattttcccaggagccctagggaaagggagaaactggcaccagctgttcctgacatctttgccttggagatggcaagtgaggacaaaggccaggatctgcagcaggagtggggatgactcaactcaggaatgtgtcactaggtagaggttagcagggagtcaggcctgtgccatacactgataacttcagtggaactttcagagtaaacatctccctttctctttctctaggggaggagttcgccctccaacaccctgccatggggctggaatggcctctgccaccccatctgctcaagtttccaactcctgagccaggcttggctcctcacagctgcggaaagggctgacgaggtcgttacatttcctaccacttcttagcagtgggttctgagtgccaggcgggtctctgccactgtggctcctttaacctcgcaaggacccaacaaggcaggtattactgaccccacttcacagacgcggaaaaggaggctcagggaggttaagtgacttgtcccgggtcacagagctgggatcccagcccggagtccgactccaaagtcggtgctcttaaccgctttgcttcaggagaatggggagcccgagtcccgctcgctctgcgcggtgcagccaggacggggctcacgcatttctctcccatgcggcgcgcagggagtggagggtccgccccgtcctgctccagcagtggtcaccgcctcaggtctggccctcgtgggccccaggggaggccccagcccgcggactttggactcctctctcccaccctcgccactcgccctctgcccgtcgcagggctggccggccccgcctgggccctcaccatcgctgctgccgccgccgcctcgcccgctcccggcttctctgcctgcggagcggccgcagtgccagcggccccggaggaagagcaggggcggggcggggcgggccgccgagcgagggcggggggcgcgccttccgcgagtggcgacagaaaccaagtcaaatcgaaagcgatgggccacagcgacctgggtccgtagagtcggaccctcccgggccccaggagcctgaattcggatgacacctctgcctggtgaacgggcacacctcggggccggatctgtggaatgggcacagtggagtgagccctggagtcttctagctcgagttcagctgaaaaggcatcattcattcactcaacaaacaccctatgagtgccacggtcaggcaccatactaggtcctggagacgccatgaacaagccaggcagggtctttatcaccctggtgagtgcatctcacccagaaccaaaaacaggcacccaaaaagttttgaaactaaagacaagtggtggttgcacaacattctgaatacatgtcactgatctgtacactttaaaataacaaactgtacattgtgtgactttcacctctattcaaaaagaaagcagccccacatgggcaaagtactagctctagcctttctgtatgtctttcctcaccatgagggcaagtgcagctctgtgctgtcatgcacccgccatgcacttgctcctcagtcagaggatgggggaggctggtgtatctactaccacttcagagccttcctgagccgaatctacccatcctgtcctctcactgctacagagaaaccaccagctacctgttctccactactccaagctgcctcggacatcttaaaataaggtccctcgtttttttttttttgtttgtttgttttttttttttgagagagacagggtctcactatgttgaccaggctggtctcgaactcctggcctcaagcagttcttctgcctcaggtttccaaagtgttgggattacaggtgtgagccactgggcctggtccctcaagtgaggcctctcttgaccaacagaattgaaagtttccctctctggggctgagcctctgtgaatacagaagtcccagaccaagagggtttcacagacactcacccccaccttggacagcctgggtcccaaggcagaagcttcacttcagttccttacaccttgaatccaggagagagaggattaacatgttgtagcaaagactaccccaagcctgggcacagtggctcacacttgtaatcccagcactttgggaggccaaggtggtaggattgcttgagcggaggagtttgagaccagcctgggcaacacagtgagaccatgtctctacaaaaaatacaaaaattagccaggtgtggtagcacacacctgtggtcccagctacaggggaggctgaagcaggaagatctcttaagcccaggagatggaggttgcagtgagccatgatcacaccactgcactccagtctgggcaacaaagtgggatcctatctctgaaaaaataaaaataaaaatatcacaagggtcttttctgacctttcctcctccctccccaaatttcagagcatgattcttccagagcctgacttgccaatctagtcccaaaccctgactctcaacccttccccttcttcctgacaacaggttgtttccaattctggaaagcctgtggaggaaacaggaacagagatagcaagaaccctccctgcaaaccaaggcggactgggcactggaaaaagtgacagtgatggtggaacctggtagggaggaggggggcctgaagacagaaaggcttattgtgcacagaggggaagaagagccattggccctgtcctgtgacactgactgactgactgtgcccagccatgggatgccaaggagagatgcttgccccctcaggacaactgagacccagaggccttgctaagtcccagaagacaaggacagagaaaagacaaataaaacatgcagaagcacaaggaaaggaatagcagtccatttcctccacccctcggctctagactacagggtcgttgaagagagatggctctggtggaagaggcaggaggatttcaaccagcttcatgcctcagctaacaattccagaagaagagtactacagggccatggcaggacccaatgggaacacttaaaaatcttgcataccaccccaaaatgctatgaaggttttgaactttccatatgccaagactcccagaaaattcttgttcttgagacctgtgacaatgaatggaactgggaggaataaagacagggtgggggctccaactttcttctccaaacatatactctttgcccttccaacaacttggacctcagatgagagaattttagccagaaggtatcctcaggaagaaaagaaatagaaaagccaaaggcaaaatgggaagagagaaagtgcctcacacatatagggatactgaaaggtctttattacccactggccaccaacagtttcccagccacatgctgggccctctaggtctctccagcccactctaaggacccaagaaatgcagccacagtccatctctcttttttctctccttccgggggaccaaggtaccttctggggcatacaacatggcagcagggcctcgggaagaggggtaggaggaccgagcagcattctctgtagaggaagacaggaaaggagaccctcttggcacacatttatggagggttgtccctgaagagaagggcaggtgggagaggttccctgttacttaagagaaggcaccagtggcaaagagcacaatgaagaggatgatgataaaaacaatcacgcagataaggacaatcatcttcacgttcttccaccagaattttcgagccaccttctgcgatgtcgtcttgaagtgctcagactgttggggaaaaggcagagtgagtgacccagtggctcctcccactggaacaagattataagagtacaagtgcagcccacaggccatactttttttttttttttgagatggagtctcgctctgtcactcaggcagtggctcgatcttggctcactgctgcctccacctcctgggttcaattgattctcctgcctcagcctactgagtagctgggattacaggtgcccaccaccacgcccagctaacttttgtatttttagtagagaggaggtttcaccatgttggccaggctggtcttgaactcctgacctcaggtgatccactcgccttggcctcccaaagtgctgggattacaggcgtaagccaccacgcctggccttgtttgtttgttttttgagacagtgtctggctgtgtcacccaggctggagtgcagtggcacaatctcagctcactgcagcttccatctccagggctcaagcaatcctcccacctcagcctccctagtgctggnnnnnnnnnnnnnnnnnnnnnnnnnnnnnnnnnnnnnnnnnnnnnnnnnnnnnnnnnnnnnnnnnnnnnnnnnnnnnnnnnnnnnnnnnnnnnnnnnnnnnnnnnnnnnnnnnnnnnnnnnnnnnnnnnnnnnnnnnnnnnnnnnnnnnnnnnnnnnnnnnnnnnnnnnnnnnnnnnnnnnnnnnnnnnnnnnnnnnnnnnnnnnnnnnnnnnnnnnnnnnnnnnnnnnnnnnnnnnnnnnnnnnnnnnnnnnnnnnnnnnnnnnnnnnnnnnnnnnnnnnnnnnnnnnnnnnnnnnnnnnnnnnnnnnnnnnnnnnnnnnnnnnnnnnnnnnnnnnnnnnnnnnnnnnnnnnnnnnnnnnnnnnnnnnnnnnnnnnnnnnnnnnnnnnnnnnnnnnnnnnnaaaaaaaaaaaaaaaaaaaaatgctgtatctgcctaccttgacaaatgtaccttcctaaaaatctggaaggccgggttgaaatttagaattctcaggatcctaggaggtctccacctagatatgactaggggtcccctttctcttcttacccctgcacactgaggggtcctcgacacctgcttacacccaagggtacaacactggcagcaaaatctgcccttgggagggcagaccctgggactgaggggtgcaggctccaggtgggcacatctcgcagctccaggactccttgccccatcgggactgctgaggctggaggagggaccaggacaggatagagggttggaagtaagggaactcctcctcctccacccactcttccccatgcccagcaattcaagttatagacactaaatttcctggggcttgtccagacatggtggctcaagtctgtaatcccagcactttgagaggccaaggcaggtggatcacctgaggtcaggaggtcaagaccaccctggccaacaaggcaaaacttcgtctctactaaaaatacaaaaaattagccaggtgtgggggtgcacactgtaatcccagctactcaggaggctgaggcacgagaatcgtttgaacccaggaggtgaagtttgcagtgagccaagattgcactcactctaacctgggcaacagagtgaggctctgtctaaaaaaaaaaaaaaaattcccggggccatgctccccaaattaagctacaattaagctacagaaacaggcaatgagccccagggagacaagggagcaatacccaagagccaagagttcacacaggactcagaaagccagagccagcctccccgctgaacacagaacttgaggctccagactttgctcaactttggagttacttcctccctgaaacagctggcctcagcccctggctggagagagagaagaatgaggtctagcaagatgtgtgggagatattattttagccttcatctagcaggggaccctgggatcaaagcatttcactgctctttcccccttctttttaaagcctactcagcaagacgccagcaatttcccaccccttgtctaacagctcctagagaaggctagaggccacagcgggggtttcctcagagccaatatttctgccctgggaaggtcagacccagatgattgtcatgggcaggcttcaaagggaaaacaagtttcccgggagagaagcctgagaatgcatgggctgactgagctttcggtctcagaacatgcctctatgggcgagctgccacctcaagccccagtcatgggatccattccctgggatccataacaatctgtggagcagagcagattcagaagtggagactcagctcacatcagctcccaaaccaggtgaaaggcaacagaaatgtcaaacttctggccctcctgtccattttgccccaccaaaaagaaattccctccctccctgttttcctccagcccccagtgggctccctgtctcactgtggcttccagatcctctgtcttgttgcggagatgttccaagttttccccccgggccaggatccgctccacattctgggtcataatattcttaactccctccacctcactttgcaggttccgcacacgatcatttcctccaccttcactggcttcctcctgtgcggcaacacggggttaattagaccaagtggtgggggaactggagacttgggctcagagatctggggagggtaaggcctcaggcagacttaagctttttgtaaaatgcttgaaatgtttacaaagagaatgttttcatgtattacttctgtaatcaaaaataaatgcatttgtaagccccagaaggtgagatgtgatgctgaacagactagatcaaacttcttttggggttattagggcccctgacaaggaaaagcagcacatcactaaatccctccccactgcttccttgctccctagagagggccgtagaatacagcagggccagcatctcacaatgttcccttccagagcagagcccgccactatttacaattcccagagccacccccctttcctgatttcttgggaccctggttgaaagtgtctgtgctggccagcagaacaccctcacccagccccacccatctgtccctctaagccagctgccggagcacggccctggccgcaatgccattgctgtgacccagaacaacaggcaaccaagtatcccagaaggcgcctggagccgttgagccacacacttctgctttccccaccactgggcgacacgtgcaggcaccaagcaaccgcctgcttatgcagatattaaataaaaatacccgcctgggtgttgggggaaatggaggactagtcctccctggctgatgtctcatctcggaggcttcatgacaaggtttttgaacaaggagagaaaaatagtatttagctcctccccgcttgacctccaaaaataggccagtggcatgggtcagaactacattatcacagagaaccaacttctggttctcttataaacctttagttctcttctccatgttaatggagaaaggacacccaaaggactcagtggacacacaaatcctttgtgtttctgtgtggggataaagtgaaaggccggagaggagagcttctgccgctgggctggaatctgaactgggaactgcccaggcgctgcctggtgtggtgtcacaacacccgcctcgggctccctggaggaggaaggcacaacaactctttgcctggaattcggagcccccatcggcgctggcacggaagcccagctccccaccagcacagaggtcaggggagggagggagaaggagtagaaacacctgccaggacagctcagagctatttgcagccaagttgtcaaagaagagaggccatagcagcactggcccagccctctaactttgccaccaactctcctcccccgacacagccaacccccagtcccaagccccctctggctcctctttaaaccagccctttcctagttcccagttggctcaccatgtctcagagcagcccaggccggtcagtaagtgaattcgcctagtcggcttcctcccagggtggccctcagttcacttcctgcttgctccaactttcagcctgcccccgcccacctcgcatctcgagtcgctccagccacacctaactcaggtttccccaggtaggcgggcattcttcactgtcctcccagtggcttcccaaacaagagcttaaacttaaagtaatagggctctcagaagccaaaggtcttctaacttgtcaggaattagaaaagaaagatcaagcagccctccgaggtttccagaggctggacctcctgatctagaaagggcagcctttttttttttttttttttttttaaatagagacgagttctcaccatgttgcccaggctggtctcaaactcctgggctcaggcgatcctcccacctcaacctcccaaagtcctaggagccatgatgccccaccagccatctccttgtaatgtcttgaatatctgactccagtttctagagactgagatcaaccatgccaggcctagctcacagggaaacaaaatgcagttatgaaaatgtattgctggataacacttgttcccaggtccctgggtggcagaaagcactaaaatccctgaagtctggaatactgtgatcctgggctctgattcagaaagttctgggttactagttacaggcccctcagggaaacttttcacctctgtggagtttgcaggtgctgatgcttagctcagatggtgctggtaagaagcaaaaagaggccgggcgtggtggctcacgcctgtaatcccagcactttgggaggccgaggcgggcagatcacaaggtcaggagttaaagaccagcctggccaacatggcgaaaccctgtctctactaaaaatacaaaataataaacaggcgtggtggcagttgcctataatcccagctactcaggaggctgaggcaggagaattgcttgaacccgggagacagagattgcagtgagctgagatcatgccattgcactccagcctgggtgacaagagcaagactctgcctcaaaaaaaaaaaaaaaaaaagaagcaaaaagatagcatgtgcagtgcaatgccactagcacagtgtctataatgatggctcaccaaacctctccttcccttccagagttcagcaattctgcatttccctttaggggctaccgcagaggtaattgatcccagtcagtgatcagaggactgccccagtgaaccagagcagggggcccaaggcaaaggatttttccactaacctggctccaggccagagaaaatctgatcttccttgacagtgtttatcaagacagaagaacaataacagggacattcagaagggaacgaacattcttgacccattccagaagaaatcagttccaaggaggaaatgtcagcttctccaacaaacactttttttgtttgtttattttgttttgttttcttgagatagtctccctctgtcacccaggctagagtccagtggcatgatcgtagcaccctgcagccttgaactcctgggctacagcgatcgtcctgcctcagcctccccagtaactgaaactacaggtgcgaaccgccatgtctggctaatttattttaaaactttttgtagagatgggggtcttaccatgttgcccaggctggtctcaaactcctgttctcaagtaatcctccctcctcagcttcccaaagtgttgggatcataggtgtgagccaccacatccagacacaaataattttttttttttttgagatgtttctctcttgttgcccaggttggagtgcaatggcgctatctcggctcactgcagcctctgcctcccaggttcaagcgattttcctgcttcagcctccctagtagctgggactacaggtgcatgccaccaggcacggctaatttttttgtatttttagtagagacagggtcttaccatgttagtcagggtggtctcgaactcctgacctctcaggtgatccgcccgccttggcctcccaaagtgctgggattacaggcgtgagccaccgcgcccggccacaaatgcctttttaaaagctttaaacaaacttcggacccctgtagctttttttttttttttttagaggcagggtcccactctgtcatccaggctagagtacagtgcagtgtgttcaagctcactgcagccttgaactcctgggctcaagcaatcttctcacctcatcctccccagttagctgggactacaggcaagggccaccatgtccagttaatttttttttttttttggagacagtgtcttgctgtgttgtccaaactggtctcaaactccaaacctcaagtgattctcccacctcagcctcccaaagtgctgggattataggcataacccaccatgctcagcaaatattatatataagcctgggcaacaacatatcaagacactgtctctataaaaaaataaaactgttggacacagtggctcatgcctgtaatcccagccctttgggaggccgaggcagtggatcacctgaggtcagaagtttgacaccagcctgatcaacatgtcgaaaccccatctctactaaaaatacaaaaactagctgggcatggtggtgggcacctgtattcccaactactcggaaggctgaggcaggagagtcgcttgaaccttggaggcggaggttgcagtaagccgagatcacaccgttgcaattcagcctgggcgacagagtgagactctgtctcaagtaataataataataataataataataaaataaaaataaagtaaaattaaaaaaataaaattggctgggcaccgtggctcacgcctgtaatcccagcactttgagaggccgagatgggcagatcacctgaggtcgggagttcgagaccagctcttgaccaacatggagaaaacccatctttactaaaaatacaaaattagccaggcatggtggcgcatgcctgtaatcctagctactcgggaggctgaggcaggagaattgcttgaacccgggaggtggaggctgcagtgagccgatatcacaccattgcactccagcctgggcaacaagagtgagactctatctcaaaaaaaaaaaccaataataaataaataataaaataaaattagccaggcatagtggtgcatgtccatagtcctagctgcttggagagctagcacagaaggatcacttgagcccaggggtgtgagacatcagtgagctatgatagtgccactgcactccagcctgggagacagagatagaccctgtcactaataatgataataataataattttatatattgattatgtggcgaaataatgtttggatatattgagttaaataaaagattaataaaataaataaaattaatttcagccggggatggtggctcacacctataatcccagcactttgagaggctgaggcaggccgatcatgaggtcaggagattgagaccagcctggccaacatggtgaaactccgtctctactaaaaatacaaaaattagctggacgtggtggcgcttgcctgtaatcccagctactcgggaggctgaggcaagagaatcacttgaacctgggaagcagaggttgcagtgagccgtgatggcgccactgcactccagcctgagtaacagagtgagactgtctccaaaaaaaaaaaataataataataataatttcacctgtttctttattttttaaaattcatttttatttatttatttattttttttgagacagggtctcactgtcacccaggctggagtacagtgtcacaatcatagttcattgtaacctcaaattcctggtttcaagtgatcctcctgcctcagcctcctaaagtgttagcattacaggcatgagctactgcatccagccctgtttctcttacttttaaaatttggccagtagaaaaatgtaaattatgtgattagtgaaaaatgttaaaatacatattgtaatgtggcttatcactgggcatggtggctgatccataccttaatatttacatgacctgggacaaacttgcataacaactctaagcctcagttacctcatcatctgtgcttagcactcaaaaaattcagtagaccaggtgcagtggctcacacctgtaatcccagcactttgggaggctgaggtgagaggattgcttgagcctgggatttcgagactagcctgagcaacatagtgagaccctgtctttttcttttttctttttctgttttttgagaaggagttttgctcttgttgcccaggctggagtgtagtggcgcaatctcggctcactgcaacctctgcctcctgggttcaagtgattctcctgcctcagcctcccaagtagctgggaatacaggcacatgcgccaccatgctcagctaatttttgtatttttagtagagacgaggtttcactatgttgggcaggctggtctcgaactcctgacctcaagtgatctgcccacctcggcctcccaaagcactgggattacaggtgtaagccaccgccccagcctcaaacataatatatatatatatattcagtgaagtgactttgtaaggaaaaactgctgaactgcttggttataggagttgtagcccaagaagcaatgggccaaatcttggtttattcttggttgtgcctctcatatacacctcctcctttccatgccagccccttcctcctagttaatgccagccccttcctcctagttaatgccagcatgatctcttccctgaacaattccaatcccctctaaactcacctttcttttctcatctactcctctgtggctgattgctatcttcccaaaacagatatttaaatatgctccaccctgcctccaggataaagccccagcttcctagcaattccctgtgtgataaaaagactagggtgacatctgacctcctgctcttctacactactacccctggctgtgcagttttgggcaagtcacttcatttgcaaaataggattaagaataggctgggtgcagtggttcatgcctgtaatcccagtactttgggaggctgcagcgggcggatcacttgagaccaagagttagagaccagcctggccaataccgcataaccccgtctctactgaaaatgtaaagattaactaggcatggtgaccacacctgtagtcccagctacttcgggaggctgaggtgggaggattgcttgaggcttggaggcggaggctgcagtgagctgagatcgtgccctactgcactccaacctggttcacagagccagagccagaccccatctcaaaaaaaaaaaaaaaaaaaaaaggcggggcacaggggctcacacctgtaatcccagcactttgggaggccaaggcaagtggatcacctgaggtcaggagtttaagaccagcctagccaacatggtgaaaccttgtctctactaaaaacaaaaaattagctgggcgtggtggcacattcctctaatcccagctactagggaggctgaggcaggagaatcgcttgaaccggggaggtgaagtttgtggtgagccaagattgtgccattgcactccagcctgggcaacaagagcgaaaccccgtcaaaaaaaaaaaaaaagaaagaaagaaagaaagaaaagagaaaaaggacactaatggagaaaactgaatgagaaactaagagaaagggaatattaccacctgaaaaggcaaccaagcaaactttcaggtacataacccttggcatatatcccagtcttctgatttatgccccaggtgggcagtttactcctatatctcagaggaaaaaagctggagaacaaggaaaaggtacattcaggaggctcaactgaacctgattcctgaaggatcatgaagttctcaccactgccaaggttcatttctgtctccaaaccttctctctgtagcctgttatgctgctggccatcccacctgtctcctaatgtgccctcttcctctctgaatgtgcccctagaacacagagattctgcccttggccatctttttcttttcttcttttttttttttttttgagatggagtcttgctctgtcacccaggctggagggcagtggcactatctcggctcactgccacctccacctcccgaattcaagcgattctcctgcctcagcctcctgaacagctgggactacaggcatgtgccaccacgcccaactaattttttgtatttttagtagagacagggtttcaccgtgttagccaggatggtcttgatctcctgaccttgcaattcgcccgcctcggcctcccaaagtgctgtgattacaggcatgagccaccatgcccggcccgttggcaatctttcttccgacttctgaagagaaccactctgttttagagcagtgtttctcagaggggttattttacctttcaggggtcttttcacaatgtctggagacatttttggttgttatagctgggggtaggggtgctactagtatctggtgggttgaggccaaggatgttgctaaaatatcctacaatgcaaaggacaccctctcacaagaaagaatctggaccaaaatggcaattgttttgaggctgagaaaaccctggtctccctatagggaagtgcagtgcctctacggcttcaatagccatttatgaaaaatccccaaatttattatctccagcccgggcctctccctcaactaccaatgctgcctctccaatgccctggacagttcacagacacctccaacacccaaaccaaaccctttatcttttctccatgttcctcctcctgggtgggactcccattctacccgcttctcaagctaggaaccacaaagcatccttcacatgcaaggtcgtcaccaagccttagttcatacttttttaaaaaaattttttacaagggcacaaaaatcaggcaattggttcattcttggtcgtgcctctcatatccaccacctccttggtccaccagctcctgcctcctggttaatgccagcagcacgatctcttccctggacaattccaatcccctctaaattcacctttcttttcccatctacccctctgtggttgattgctatcttccagaaacacatattgtatgctccaccctgcctccaggataaagcccaaacttcttagcatggcattccaagactgttctcaacctgcttttctgaacttctctcccattagattcacctcccagccctccagtcaaccaaattacatgtcctttctcaaacgtcgtacaccatccaccttctatatctttccctaaggccttcactcatcactgcttatgacaattctattcacatttaagacatagcctccatgaagctttagagatttccccactgaagctaacttgttcctgttctgatctccatcacattttatttcttttaaagaatctttcacatactttgtcatacatatttgacccctccaacactcttaagtcctataaaggcaggcagggactgagtcctcactttggtaccctttgtagtatatgacatatgtcctagacatgtaggcaactcactaaaggtttcagatattgaactgagaagtctgaaagaaagctgctttctccacagtacagagaaagatgatttttgttggaaaagatttatagagaaatttctttcctaaagtttgacctattttatggataaatgaatgctaaatatcacaaatctttgtatattggtcctgaaaggaaaacctggagatactgagttagcaagctcatttattagctgtatttttcttttcttttcttttctttttttttttttgttttgttttttgagacggagtctcactctgttgcccaggctggagtgcagtggcacaatctcggctccctgcaacctccacctcccaggttcaagcaattctctacctcagcctcccaagtagctgggattacaggcgcccgccaccacgcctggctgatttttgtatttttggtagagacggggtttcaccatcttggccaggctggtcttaaactcctgacctcgtgatccacccacctcggcctccctaaatgctgggattacaggcgtgagccactgcgcccagctattagctgtatgtttcctatacagaatactcttgttcacccaagactattaagaacttttgatctccagctgggcaaggcggctaatgcctgtaatcacatcactttgggaggccaaggcaggaggatgccttgaggccaggagttccagatgagtctggccaacataatgagaccccatctgtacaaaatatttattattttattttattttatttttgaaacagagtctcgttctgtcgccaggctggagtgcagtggcgcgatcttggctcactgcaacctccgcctccagggtttaagtgattcttcagcctcagcctcccgagtagctggaactacaagtgcctgccaccacgcccagctaatttttgtatttttttagtagagactgggtttcattatgttggccaggatggtctcaatctcttgacctcatgatctgccagcctcaacctcccaaagtgctgagattgcaggcgtgagccactgcgcctggccgattttattttttttttattttatcttattttattttagagatggagtctcactctatcacccaggctgcagggcagtggcacgatctcagctcaatgcaacctccacctcctgggtttaagcagttctcctgcctcagccttccaagtaactggaattacaggcatgcacaaccatacctggctaatttttgtatttttagtagagatggcgtttcaccatgttggccaggctggtcttgaactcctgacctcagatgatccacctgccttggcctcctgaactgctgggattacaggtgtgagccaccgggtctggccaaaatattttttaaattaaaaaaaagtttgaaaagaacgtgatttccctctctccttttaaaactgcactcatccttcaaagcccaagtgagaccgggagaccctgtctcaaaaaaagctttcctgatttctctagtgtaattcatttcttcctcaatgcttccattgcactcatttaatagtatttatgactttctacattctattactgttattactatcctattatttctaaattattttattattatcatgtttccttaccatttaactcctagaagacagaggctacaattgagtcatttccccctctctgtaacttgttcagtccttagcacataacagaccataaatgctgaatttactggaagcattaatattgagcagtcctagacgagtggatacaaatttcctaagccaaactgaatttgtttgggccagtatttgacagtggattaagaaatacatctcagactgggagcaatgactcatgcctataatcccagcactttgggaggccaaggtgggaggatcacttgtgttcaagagtttgagaccagcttgggcaacatagtgagaccctgcctctccaaaatataagaaattagctgggtatgggggtgcacgcctagtcctagctcctcaggaggctgaggcgaggagatcgcttgaacccaggatgtcaaggctgcagtgagctgtgatcatgccactcagcctgggtgacagagtgagaacctgtctcaaaaaaaaaaaaaaaaaaaaaagccaggtgtggtggcaggtgcctgtagtctcagctacttgggaggctgaggcaggaggatcactagagcctaggagttctgggctatagtgtgctatgcccatcgggtatctgcactaagttcaacattattatggtgacctcccgggagcaaggaaccaccaggttgcctaaggagtggtgaaccggcccaggtaggaaacagagcaggtcaaaactcccacgctgatcagtagtgggatcacacctgtgaatagccactgtactccagcctgggcaacatagtgagaccctgtctctaaaaagaaagaaagatgggtctgggcatggtggctcacacctgtaatcccagcactttgggtggccaaggcgggtggatcacttgaggtcagcagtttgagacc

SEQ ID NO: 78 - DNA, 24214 bp, Homo sapiens
tcctacatctatttccaaagctgcctccgctgtttaggctttgaaacaaaataggagattggtgcccaatggccaccagggggcgactggagcccttatgtgatagacaacctcgcccaccaggctgggtttccgcacaccctttaaagccagggcggaaacaagctcaccagaggctagccccagccttcacaagctggcatgtggcgggcaggcagcagacagtcggggcacaggaaggggaggagagcccaacaaggagttcagatttctagctaaacaagagaaggattcaggaactgccaaaaacttaaacagaaacttttcctttgggatccttcgttcttagaagttggggggaaaagaccctgccaacctcttccaaatggaaatttttcttttaattccctctccatccccatgaaggcctccttgtccctggcaaaagcaaacagaaggtcacatgcttcacaaagtcatcatcataactggaatcagagaagggatgatttgttttagctttaagttgttgattcatgcacgttcctgaagtttttttaaataacatcttccaactaaaaggagcctaaaataaacactgcctttgtgtagctgacctgctagcagctttaaagccaaacctgaagtctactgaccaaagaagaaagaggaaaggaaaaggagcacccaaggagaagagagggcaggggcagggagccagatgtggggcgcctcacccagagcaccagggtattcattaggcgatcgatactcgttcttttgaactttgttctgccgctgttttgcatcagcttagtgtcgggacctggaaaagaatgggaagggctgggaaagccaaataacacatctgcctctgggcttctgccctgatccccagactgcaggacaccagggtggaatagagatactggctagataagaagcctgtatacacagctggaggttttttaccttaggtattctcccacctcatcccatactcctgagtgagggctggctgagtcactcttacccttctttctttggatgctaggaggctcacctgcaaagatgaccagcccgaagcaccactcggtgtttcgcagcacacagccccgcagcagcatgttctggttgctcagagggaacttattttccttccagtagagggttccgctgaatttgtccagtttgttgttgggaggttcacagatcacttcacctgaacaggagacaagaattccactgcttaaggtccagtctacagcctaaccacaagacaataaaacaaagagaaaatgagctgagcgaagaggatgcaagggcaagggcccatccatatgctgctgggaggagtgtgagctgatgcaactcttcaggaaaataatgaagcaggccgggcgcggcagctcatgcctgtaatcccagcactttgggaggctaaggcgggtggatcagctgaggtcaggagtttgagaccagcctggccaacatggtgaaaccctgtctctactaaaaatacaaaaattagccgggtgtggtggtgggagcctgtaattctagctaatcgggaggctgaggcacgaggatcgcttgaacctgggaggtagaggatgcagtgagccgagatcgcaccactacactccaacctgggcaggagtatttaaaaaaaaaaaaaaaaagctgcagcatgacctaatatttgtttgtacaaacatgtatgaaaagtgtggatgagcacacactgactgtcaattaatgtggctacttcagcagggtagaagaggaaggaagagctattttcttcttcttttttttttttgagacagtgtctcactgtgttgcccacgctggagtgcagtggcccgatctcggctcactgcaacctccacctcccaggttcaagcaactctcatgcctcagcctctcaagtagctgggactacagatgcacaccacgacgcccggctaatttttgtattttttttttctttttgagacagagtttcgctcttgtcacccaggctggagtgcagtggcacgatcttagctcactgcaacctccgcctccctgcaacctccgcctcccaggttcaagggattcacctgcctcagcttcctgaatagctgggattacaggcatgcagcaccacgcccagctaataatttttgtatttttaatagagacagggtttcaccatgttgaccagactggtctcgaactcctggcctcaggcaatccgcccacctcggcctcccaaagtgctgggattacaggcgtgagccatggtaccgacctctattcactttttcttatacactctgtatggtttgtcttataaggaacacatattattattctgagctaataagctaaaagaataagctgaatttctctcaacatgcatagcaagtggggagctatcagccacaaagtccccttgaaataattataaactcaaaaccaagagggagccacatgacattacaaacactcccctccccaaaacagtccagggagttgcataataacaacaaaaagcccaaaggaaaatgtataatttaacgcccccaaacaaaacccaaccccactcctctaccttcaggctgctgctccaaaattactcaccgtcaaacttggcaagcttactgatgtctcccaattctgaggtgactggaatcgcctgacgtactttcatgttggtctcgctggaaggacagtatctctgagtccccgctccctcctcatcctctaaatgttttttttcacagatggggtctcgctctgctgcccaggctggagtgcagtcgcacaatcatagctcactaaagcctcgaactcctgggctcaaacaatcctcccgcctcagcctcccaagtggctgggattataggcattaaaaccaccatacccagctaagttttaaactttttaaattttttgtttgtttgttttatagagatgaagtctcaccatcttgcccaggctggtctcaaactcctggcctcaagcaatcctcccacactggcctcccaaagtgctgggatttacaggagtgagtcaccatgcccacctctccccatcctctaaattctacctggtgacacctaagcatggtgcataactgctcagcccagcaaatactggttgaataacacttcacacatcccatccaaagcctttcttacccctaatttttccaaattcagacagagcccaggcctgagaacctcattcaaagacaatctttttacctccaaagagacagaaggagagggctgacactgagcatgccacttacccatcaagttctgctgtctctatgtaacacagcccatggggctcactgctggaaaggaggaggagatccgcctagagagaaaaactaatgagaagtccaaatatgcaaacctccacccccagtgggctgtaatggtggctccttccactaagcattcttggtttgcttagttccaggtgcataaatggctagttccaggcatatcagcatgacacagaagcccctggtgtgagaaagattcctgccacgggtgtttaagaggcaacagtaaatcaggaaagattcatccttttctcacaaagaagaggaagaacctacaggcctagaggggtaccctgtcccttaccgccacaaactggttattttctagcttgataatatcaccaacacagacattcatccactgctcctgctggaggctgaggcaacgagaagacagtgaagaggctgtcaggagctaaagaggttcctaagggacccccttcgtccccagagctcttgtctccaacaggcactcacattccattgatcagcacctgagactggcggttattcacctggttatcgctcttgtggcggaactgaaaagaagaaaactgaaaggtaagacaccttcccccgcctcgaaggaattcgttgatcagtagaactcagagcatgctggttaacgcctcatacacaccccatcacaaaccagttcactccctgattccctctccccacgctcagcaaaaagacatcatggatctagctggaccgggtaagggatgtcaaggtcaccaagaaattgtgctgaatgaaggtggccatgagatgggggtggggctgggagtaggggtgggtgactgggacaaaatagaagaatgaaaaccactcacatagtcatcagtggcatctttaacagctgtgatggtgaggacaagaaccaaaggcacaatggtggtgaaccaggacagggaagagatctgggggatcaactgaaaaaaagaaagagaagtatgcctctgaggccccatctgatgccttcattccctttcctcttccttggctttattcagtttggggagctgcaaaaaatctactatgggtcacctacctgcagaatgaggaggaacaggaagtaagtgttggcaacttcctggaactgctcaaagaggttgacaggcaggaaggtgagaatattgtacttggaggtcttgatgcagttactctatggcagtaggagagaagataatgagcagtctccagtcccaacccagaaccagactgaggctgcctcccccatctttatacttccccagacctctaccccaaaagctagcaaacacaggtgtgggagggggaaagaggaggagagaagggagtctcaagggggtcaatgtattctgcttcactgacaggtgaaggcatgaaaaattcagcacgatagcagatggagagtggctgaggaggttgcttcccctcccccaagcactcttcccaggcagccctcagtcccaacggtaggttgtccttgccccattcccctctccaaacagagagagggaacaggtggtctagagtcgcttaccgcatactggaatttctcattgtattctcggtcattagcccgcgccctcctttcttcttctgcaacaaaatgatgctgcagtcaggaggagcaaactgaggtctggaccaacactttgctggggggttccctgtttttttccacagaatatcattttaaggagttagctccacaactgagggggtcatcaaattcttccctccagtccacctctcaccagcagcctgaccacacggctctccaggttacattcacaggacaggacatgttctcttttcctcaccaccaaacttcaaggtcttccactggaagcacccagtttgtctcccccacccccactccagaggaatctgagccactgacagtcctgggattccccagccccttttgctgctattactaatgcatacattgtcataatcaaggagtagcgctgaaaacgcaaagcttccttccccctggggaccactgcagatctagtcgcggtactgctctctcccttatttagagagtggggtaggtggcaagaaggaggctccctgtgccctggagctgctctgcgggagcatcccagccccatgtgcagtcccccctacaggagcctctggttgtcacatgtcaccagcaactgcttctgactggcccgaaatgacatcaccttatttcaaagctcatcttcaagtagaaaaaggtgtggggggtgcgtttcagggatatgggtcatgcagactgagatagagatagaggagggaggaatgaaatgtaattgaaacagttgctctctaactggaccttccttgtaccatctgcacacatttagctttaaagggctcatctgtcactcagttagtgacacctatctagctaaacctatctgaaacctctgcaggtctgggactgcaggcatcaaattcatgtcccagaacaaggagctgtcctataatagattccccagcccgtctccccgggggtcaccatgacctcatgctgcaaaaaggggtaacttggttaggcagcaaacctaatgccttaagcctgtccgggagccaaagacagcattccagaaccctttctacacaccccaggacccctgcagagcacactgcagtaacaaaacccaggccacagtgccccctgcctaccaagccacttcactcccataaacttccctagaggggctctcttgggccaagtcccctgcgcaatcaccaaagaccatgcaaacgaagaaggtagggactggatccttcggagccaggatctctgggtctggaaagaggatcaaggcaggtagggggaggctggggacaagtgaatgtagggattggaggggggaaataatgggtgcgggagagctgccaggcgctgcctcccgttacctgtcccccaagagggcttctttcggctccaagagggaggcgcctgggcccgggcccacttctcgggcatctccttggggaccgtcatgatcccggtttgagtgggggagggcagaccgtctatatgtccttggccttagtggcatcgacggggcggctccccggggaggtgcaggagccgcagccgctcagaggggagccccagccgtcgggcgcgcgccccacccgcagcccaggccatcctcccggccgccggcgctcggggacaccgcgagctcagctgcgccgccgccgccgccccccatgccccccggcggatgccagcgtgcgctgagtggccccggacacgccgagcacgcccagggttccgcccccgcccgctccccgactgcaggagccgcagcctgccagcgcgccgcgtaggcgaaagctcgcgcgcgagccccgcctcccctcccacccccgggccgggccaatgcgggtgagcggactgccggcgttgtcgggggcaaccgctttcacacacacacacccccgcccgcggaaaaaccaggagaaccggtagatggaaaaacgaggggagcagggaaggggtgagaggaccaagcagagatgagaacacagctccctaggccagaaagcaggagctgcaggtgcccgaagataagactgcaggtgtttcggggcgtggggctggtgctctgcgctgtcctggcagataacccagctttgggatcaagcggaagaattcggtttcctaggctgcccccaagctgggtaggggctgctgtaagctaccctccctcagacccataccagttgtcccttttccttttgctccctgagccataacaacacccactcttgatggttcccgggatctcccctccttgcctgtcttacctggggggcgcttttttgcacacactgccatctcacccagcaagatcccagcaatcccatgggagaccctgcaagaagtgacagacgaatgaggtcaggaagctgaggataacccttccctcccctcatgagacctcttttgaagaccctcttctccagctctgaccctgcccctcccccagcctccttctcccagtctctcctcttactgccatgatgggttcctgggaaagaggggacttccccaccacctcccatcatgcccctgccttgggtgacatggggggctgagactttacagaagcccatgcctgtagggaaaggagaagaggccagatattgaaaaaaggggaacagctctcaaggtatccatcccagggacaatggaggctctcatgtgttctggcggcaatgagtagtgcttgtgcttactagaaagcagtttccccaaagggtggggtggagggaacatgagccaggaaacacctggcagggcatcaggaaacagggtgggcaggctccacccttctcgaaaggcttataagttccctgccatccccaccccccattactagggcttccattatcacctcctccaggggagctcacattagaggcatggccctcactttctgcacagacagtccctaaacagcttcccctcagcctgggtcagccacccttctgggctggcagaggggtcttcccaaccctggtggggagtttgcccctccctccctcccaccccaagcctagtccagtcagtatggcacagggtgcaggcttagggagcaccagtgagacaagcctctgcctgcttccgccttcccatgtcctttctcctaaaaggttcaaggcctggccttacaaggcagagcctcatccttactccccagcctggcccaaaggaaactgccagtcagtcacctcctctttccttgtctgggtggaaggcctttcacctcctcatcctctttggttccctctgcctttagcctaccaggcacaccccaccaacctgtcagccccaagagatactaattgcctgtctggctaagctctataattacagattctggccacaacccagtcacccacaccagttctcccttcgctagctcagatcccgcccttacaccaagtcaggcaatcctgaaagccagaagtccttttcatccctgaccttctccaactatggcagtccagggtgcctggctcaggaagaaaaacctcatccatattttagagatgccaagccctcctccagggcccccagccagggtctccacccagtctgagtatgagtcacgggagggtggggagcacagggagaggttaaaggatgcaagagtgggcatcacaagttctacaggcagccccgcccttggggaggaagggatcaagaaacactatcagcctaaacatctgagtttgagtcccatgaaagagttaatgtaggagctgcacacgccatcaggagtcaggagtctggatatggaccaggaaagttgttctacctctgagaccctggggagactggaagcaggcttggccccagacctcatcccctctgggggggccatcattccaaggggaagagaggagagacctgggaactgggatcccctctcacttttccttcttagtctcacacagcctgggttttctgagcaggtcaggcccatcagccacgttgccctgccccgtcacccagccccagccccctctcggccacatttgggataaaaatagccagccccggcaagcaggcaatgctccatggaggaaaacagctcctcctataggtccggtccctgctcccttacaagcaagagccccaaaggctggccacttctttcagaggaggatggcaggtcagggaaacaggaggaaatggaactcgagacctccagctcactggccaccaacacgagctcgggccaccttccctcaccaaggacagaactcagggctcccggcacagctatcatctcccagagctactgccccttcctgacaccctcagttttcctcaggcatagacctccaccttactgagacaaagcctaccagcccaaactcccttctccaggcaccaaaccctcgggtcccggttactcctctcgcccaacaactctctgggcgggtctcccctggccaaggctgcacgagcttctccttggcactcgcgccgctctcctgctctccacgcgccccttcggcaccccatcctcccatcctgtacgcagacccccgctctgccccgtccccgggcacccgacagcccctcgtctccagtcggccgccatccccgccccgtctggccgcagctcccaaatcttggcccccggtgctccccagtctacacccgctccccggcccctccagccccgcggctgcggccgcatctccctctgccctcctggccccgcgctcccgggcgcccccgcttcgcctcgcctcgcctcacctcagcgctcagcgctcggcgcccgccccggcggccccgtactgcccatgccgggggctggggcggggggcgctcggctcggctccccacgggctcccgcccccccagctgcggccccgctcccccggggcctcggcccgctactttgtgtcagtttcggccacggcggggcggaagtgacggagccggcggcgggggccggggggcgggagggggttttggggaggggagaaggagcggggaggagggagcagccatctttgtgcggggcagtgggagggtcttagcccttccgagcctcggcgtggctgggctgggatgcccccacacgtacgtccatccgcatcttaaaagaaaaaacaattcgggaggctagatcgctctgagggggtatttttaattcggaagaagggaatagaggaacactgccttctctgcaaaacgagcatcctctgcagggagcggcaggagagctgtagaagtggtgaataaccagaattttccctggcgccaggttgccctcagcccgactctcgctcctcggagccgcccgccctccgttccttcaccctccctcctcgccctggctcatttcactgtatctcaactctccttgaatgaacgacacagcaccgagatgtctaggaacggtgcctcagtttcacagccttgctctctgtctctgtgccccgccgccctccttccctccgcccccaccacgccccctgggtggaggcggcttccccacccctaactaccctcttggggaggcatccccgagagggtgaaggtgggaggcgccgaggcgatgagagctaggagtcggcagtcgggacaggctatggagggcagtccccagggttgtgccctacactggatggtggccccctccaccctgcagatgcccgcagccgtccccatccagcatccaggtgcgcaccctctagcggttacctcgagcaactacattccgagaggccctgagggtcagaaaaccgctttgcgggaggaggggatgagaagcctgagtcctggtaccttatcctcctccacttctccctgtccaggatccttcttagtttaggaggaagggatgccaaacagataaacagagaagcctcccaggttctggcacattaacaaagaggaagaatgactgttgttcccaggcggggtcagtggctggctccagggtccatgagtgaagtgagggttgtcctaatcatagcttacactccagcatctgagctgaggcaggagtttccaactctgaggctttgtgttgagcagacaccagatcctgagctggctctgggccctcagggtggtgcagagccaccaacagctggtaagtggctgtgccaacggtggcccccaccagaggggccaccacaggcacccaccaccagccattaccagcactgcaaaagaaggacagtgggaaggtatcaggagtgactcccttagccttcccctctccaaggacggggggcagtaacaagagagtgccctaaagttgttcccagggtggtagacaccaggaagaggattgccttgtcaccaaagcatagtatttagaagagggaaccccaggagagcttggtccagcctcttgccttagggaattatctgaatatattaattttgctgatgaagtcactaatgtgcatggaagtaatgtggcatgcctaagaacacaacctctaaatcttactgtttcagtgaaaagttgggagggaagcaagggagaaagggggagaatatgacttggagaaagaacactgtcctaagaagccaagagagctattttaaaggcagagtgctgtggacccagggacagagcccttagcagaggaaggtgagtggaggccagcaccaggagagtctgtctcccacctgaagacttcaggaccccagccagccacgtaggtgaagagacgtgggcccaggtcccgggcagggttgagtggaatcccgcagttggcacccatggataacccgagggccaggatcagcatccccaccaccacaggctccagacccgcagggactcccttgttccgtctgtccaggatggccaagagccccacaatcagcatcccagtgcccagaaccttggagtcaacagaggcagagggttccctgtcagctgccaggtgctccatctgccctctctcatccaaatattccatgtcatctggctttgtgcaacacaggcagttggggatggtggggagtgccaagatagacccaacccacactccacccagagactgaacaataggctggggtgccgaggaacaggaccaaagtagtgtccccaggtctccccctcacacttacctgatccaggaagccattgttcagggacagatagggggcaggataggtggcaaaaatggaggctgtctccttggggccagtcactgtcaggttcccacctgtatagttctgtagggcatctgtggaggaagggaacacccaggatttccctctttgctcattcatccaaaaccattctgaggcacccctgcccacccacaggtgctctcaaggcacagctccctctgttccctctgtcaccatggtagagaacataggtggctcccgaagcacagaaagcagacagcaactgcaccaagatgtaaatggggagcttgacccaggggaggcgtccaacgatgcacatggccagggagaaggctggattcaggtgggccccttcaagtatcaaggaaagaaaaagagcatctattaagtgtcactgccaggcattgtcaccagacaacactactgctccttcctatagctcttaaggcagatagtgtaattctcatcacacagcttaggaaattgaggctccagatgttacagatgttaagtgacttagcaaagtcacactgtgggccaggcacagtggctcacgcctgtaatcccagcactttgggaggccgaggcagtggatcacttgaggtcaggaattccagaccagcctggccaacatggtgaaaccccgtttccactaaaaacacaaatattagccaggcgtggtagcaggtgcctgtaaaatcagctattcgggatgctgaggcaggagaatcgcgtgaacccaggggcagaggttgcagtgaacagacatcacaccactgctctccagcctgggcaacagagtgaaactccatctcaaaaaaaaagaaaaaaaaaaaaaaaaaaagaagaagaagacactgtgaatccaaagttggaacctaggtctgtctgctttttccacagcaacacactatgtctcaaggctccacccaagcacaccgatgcagtgtgtatctggggtacaaacaggagaggtcctgagtggagatgagcccccagaggacttcgggtgggggatacaagaggatagcagctgcccttcgtgccctgccattgatttctgtctaggtgagccaagcattagtgtgaggaagcaggatggagagatacagaaagaggaggggctggtggggccaaaggcttatttcagtctggggcactgttcaaggggataatgtccacgagtcacagaaggatttgcgtttccaccatcaccagacagacaaactggcatgcacatcccacgtgctctgatgaccagaccccaccctcctcacctgagacgttaccacccacgtagatggctatcgtaacggccagagagccagccagaaacatggtgaagaagttgcctttggtttctccactggtgacagcctgggccacagctccttgggtgaggagctgctgagaagaggagagatgaggaacagggagcccaggagaccaacagggagaaaggttgggaaggccaggggagcagccaaggagatgaatgagcacagaagacaagcaagggaaggagaaaagcagaaggagggaagggaaaagaaatggggaaagtggaggaagaagaaagggaaagaatgtgggaaaaaagaaaagaatttacccaactcataggcatttgagggtacaaacccatggcagggctcagctttaaaaagtcttatctaagattctttctatggaagagttccatcaaagccaattttaaaagcctatgtgaaaaataattattcttgctgcactttatacaatcatcaggccaagtataataaagcacattggtcttaccatgaaaatggtctttcataaaaatgggaaactgaagagagaaaaattatgtttcaagaactatgatacacttgttattaaagaaagaattaaaatgacaagaataaaaatgatgaagtaggagaggaaaggagattaggagagacgagaggataaaaacgaaaagtgatagggagttgagaggaagggggacaccaagagaaagagataaggacaacagaaggagccaggaacttttgcccaacccccttctttccttcccgcagtgatcctacctaccatgagtacaaacacacccagaaactctgccaggcactgccgggccaggaggctgcgtatctggaggtggcccatgatttcagccggggcctgagtgaagaccatggtggaaacaccctattgctattcactgctccctctgtctgcataggcacactgtcactgcacagctactgcctgcctccagcaaagataaggaacagactttaaaaccattagctcagttcctgaacagcagctacgtgtctgtgcacgtgtgtaggctaggaaacagagagataacaagagaatgtctgggagcaggctatgaacacagagcctggagtttacccaacctctgtctcttttacccttcattcccagtcatcacaggactagcctcccccatcctgacaaatagaaggaagtaccccgcttcatagacattagatctcttggtcctgaagtcagctctgcaaagtagtactattgcttccattctacagatgaggctagtgggccttagaactccccaagatcaaactttttttttttttttttctgagagagagtcttgctctgtcccccaggctggagtgcagtggcaccatctcagcttactgcaacctccacctcccaggttcaagcaattctcctgcctcagcctcccaagtagatgggactacaggtccatcacacctggctaattttgatattttttagtaaagacttggtttctcgggaggccgaggcaggcagatcacgaggtcaggagttcaagactatcctggccaacatggtgaaactccatctctactaaaatacaaaaaaattagcgtggtggtgcacgcctgtagtcccagctactcgggaggctgaggcaggggaatcacttgaaccagggaggcggaggttgcagtgagccgagattgtgccactgcactccagcctggcaacagagcgagactttgtctcaaaaaaaaaaaaaaaaaaaaaaaaaagacggggtttcaccatgttggccaggctggtctcaaactcctgacctctagtgattcaccttccttggcctcccaaagtgctgggattacaagcgtgagccaccgtgcccggcccaagatcacacaattatttcatggctgagtgaattcaaatccagattttctgactctccagctggtaacccacaaagcctctcatttagaacctgaagcctttccccaaaccatttggatgcttgaagaactcaataggcatctggaaagactgggctaaagaccacagactgtgggaatgaaactcacatattgagtgcttgtacttcccttatgccgagtgtcacataggttagagaatactccatctttgtgtcccctgacatggcttgacatgaggccttcacactcatgctgagttccacctggccttctctgggtgcatgctactcttgctctgcatgaagtaaccgcatcctacttcttcatatctcaaggctccaattaaatgcattcaaagaatctacgtctagacactggagaaacagtggtgaacaaaacatagtctctgcccttctagagcttatgttctagtaggtggaaacagacaatatgcaactttttaaaataccatatacagtttatgaagttcttgagggctaccattatgatttatgtaaccctgtgggctctaccactgtcctgggcacatctgtgtgactagtaaagaaataatatttctttactaggtttaatggatactatagtgctccacccagattcccccttgggagccaatatgcccattcgctacatgtaggaaataccagctgctgataccacatagctacctccctcattgggcaatgcccttcaagtcagaaagatgcctcaccgaaggttacatgccctcctatggggcccatgtcaaacactgattgatggagggatataaaagtctagcctctttgcctcactttgcgacaactctaaagggctgttccagctccagttcccccataggatccatttaggcatctgttatatcatccatgtgtgtcagtttctcctggtgcctaatcttgttacaggaaaggggtctgaatccagatcccaagagagggttcttggatctcacactagaaataattcaggctgagtgcggcggctcatgcctgtaatcctagcactttgggaggccaaggcgggatcacaaagtcaggagattgagaccatcctggctaacatggtgaaaccccgtctccattaaaaatacaaaaaaattagccgggcatggtggtgggcgcctgtagtcccagctacttgggaggctgaggcaggagaatggcatgaacccgggaggtggaggttgcagtgagccgagatcgcaccactgcactccagcctgggtgacagaacgagactccgcctcaaaaaaaagaaaaaaagaattcagggcgagtccatagagtaaagtgaaagcaagtttattaggaaagtaaaggaataaaacaatggctactccatagacagagcagccccgagggctgctggttgcccatgtttatggttgtttcttgatgatatgctaaacaagaggtggattattcatgcctcccctttttagaccatatagggtaacttcctgtcattgtcatggcatttataaactgtcatggcatgagccaccatgcccggccatgacctgtatcttatggcaacctcctatctcattctgtaacttagaatgctttaaccatctgggaatgcagcccagtaagtctcattctcattttactcagctcttgttcaaaatagacttgctctggttcacgtgcctctgacatttccccccttccttttataagagaagcactaatcctaagggttgcagagggacgaaggtccatcttctgtaagttcttcaggatgaataggggcgatgatatttttgcctaactcttagaatctctcatattcgtggtagagaggagctcagttggaaagtgttggtatgggccaggcgggatggctcatgcctgtaatcccaacactttgggaggctgaggcaggcggatcacctgaggtcaggagttcagaccagcctggccaacatggtgcaacactgtctctactaaaaaatacaaaaaaaatagccagatgtggtggcgggtgcctgtaaccctagctactcaggaggctgaggcaggagaatctcttgaacctgggaggcggaggttgcagtgagccaagactgtgccattgcactccagcctgaaagaatgaaactccatctgaaagaaaagaaaagaagggaagggaagggaagggaagaaaaagcattggtatcttgagggccattcataactcatgagttctgacaaaaggtgatactctggaagattcataagtgttcagtttaaggaaacattcagtaagcttgtcctccattcctatacaaagattacaacagctatacattccacaaccataaagcaaaataagtaaaattatcccaagtaaactaaactagaaggctttccatgaactgaggaactgttggaaccacgctgatatgaggttgctagatgattccagtacatgcccagaattagaatattgatgcagatttttacattacccatccctcttgtttcttctgagcagcagtcagaggccactggttggttcacaggactaagcagggttagcctaaattgcagaaacaaacttaaagacaactgatgagactggaatttaataacaagtgtatcatagttcttgaaacataatttttctctctccagtttcccatttttatgaaagaccatttttatggtaagaccaatgtgctttattatacttggcctgatgattgtataaagtgcagcaagaataattatttttcacgtaggcttttaaaattggctttgatggaactctgttccatagaaagaatcttggataagactttttaaagctgagccctgccatgggtttgtgccctcaaatacctttgagttgggtaaattcttcctctccttttgaggtccccagataacttggggctcctggaccttttagaaggtgacattctttacttaccacaggtcagaaaccctgtacagggactgtgtaggcaaggttatgagcccaggtcgctaagtggcttttataggctttacaagtcaagtttgattccttaatggaaagcacaccattccagtcaaacccttcataaaataaacaatttctccaattgtgtcctgttgcaaaagaaaacagattcttattacccttatgcaaataactgcattgccataaattaagaatacacacaaataatttccaaattctggagaaatcaagtagagagatgcatatactccaaattttgttcacaggagtatactttactcgattattaaaagctgtaaatatctgaaaagaaaagttgccttgactctaaaaaataaaacaaaggatcagcaatgttttaagcaaaggcaaaaagattgctttagtcttctttagtttatgcagttaacttttgtttgatatctatgaacatttcagctccccatgagagttctgaaagttgtttcctctattctaatgtcacaatctccaaagttatcagaaacctgcatttaagtgcacctgttaaagtcctatggctgattataaactaccttctaaagaagatcaaaacaagacaacaattgtctgtggatgataaaaagtcttagggccaggcgcagtggttcacatctgtaatcccagcactttgggaggcggaggcaggtggaacatttgaggtcaggagtttgagaccagcctggccaacatggtgaaaccccgtcaccaccaaaaatccaaaaattagccgcatagggcaggtgcccataatcccagctactcaggaggctgaagcagaggaagtgcttgaacccaggaggcagaggttgcagtgagctgagatcgtgccactgcactccagcctgggtgacagagcaagaatctgtctcaaaaaaaaaaaaaaaaaaagtcttaggacagccactagtaaagccacaattaactaggaaattttggttacttctgttgcatacaaaattttatgtaacaattattaataacatacgctaagtcatattagaattataggaatttctcataattttggaacatgtaccaataacacatttaatctaatgctccaaagtagataaactgaacaattttttttgttgttgttgttttttgttttttgggtttttttgtttttttaagacagagtctccctctgttgcccaggctggagtgcaatggcatgatctcggctcactgcaacctctgcctcctgggttcaagtgattctactgcctcagcctcctgagtagctggaattacaggtgcgcaccaccatgcctggctaattttttggtatttttagtagagatggggtttcaccatgttggccaggttagtcttgaactcctgaccttgtgatctgcctgcctcagcctcccaaagtgctggaattacaggcgtgagctactgcacccagcctaaaattgaacaatttttaatagtcaaagaagcagcttatgaccttaaagaatttagcaaacttaatatctgacctgtataatttagaccaaatgtttacatttttttttgtttgtttgtttgtttctttttagtcagagtctcgctccatcacccaggctggagtgcagtcgctcaatctcggctcactgcagcctctgcctcccgggttcaagcaattctcctccctcagcctcccaagtagctgggactacaggcttgcaccactacacctaatttttgtatttttagtagagatggggtttcaccatgttggccaggctggtctcgaaatcctgagctcaaatgatctgcccgccttggcctcccaaagtgctgagattacaagcatgagccaccgcacccggacaaaatgtttacatttttgaagattttttattttaccaataatctttaaaactgtatttatttcccaaagattacttaagtcacatgaactaaataaagggtattccactttttacttttctgataaaatgtttgatttaagcaattcttattgttaaaccaattaattaaagcttttccatatataaacattacacacataatacatataaatacacagacagacagaagataaggatcatcccctaaactgggaattggactttaaaccagggctgccattatgaaaagagaaagcatggccacatggttacaaggtcaagctgctaaggacatacaagacaagaaggaggccgggcatggtggctcatgcctgtaatcccagcactttgggaggctgaggtgggcggatcacctgaggtcgggagttcgagaccagtctgaccaacatggagaaacctcatctctgctaaaaatacaaaattagccgggcatggtggcacatgcctgtagtcccagccactcaggaggctaaggcaggagaatcgattgaactgggaggcggaggtggcagtgagctgagattgcgccattgcactctagcctgggcaacaaaagcgaaactgtgtctcaaaaaaaaaaaacaacaaaaacaacaacaacaacaacaaaaacaaataggatgaaatgtgaaagcatttggagctcatgcaagaaagaattcagggcgagtccatacagtaaagtgaaagcaagtttattaggaaagtaaaggaataaaagaatggctattccacagacagagcagccccgagggccactggttgcctatttttatggttgtatcttgattacatgttaaacaaggggtggattattcatgcctcccccttttagaccatatagcataacttcctgttgttgccatggcatttataaactgtcatggcactggtgggagtgtagcagtgaggaagaccaggggtcagtgtggtcatcttggtcttggtgagttttcgctggctctttactgcaaccttttttatcagcaaggtctttatgacctgtatcttgtgacaacctcctacttaatcctatgactttctttttttcttgagatggagtctcgctctctcacccaggtgggaatgcagtggtgcaatcttggctcaccgcaacctccgtctcctgggtccaagcaattctcctgtctgagactaccgagtagctgggactataggcacatgtcaccatgcccagctagtttttgtatttttagtagagacggggtttcgccatgttggccaggctggtctctaactcctgacctcaggtgatccatctgcctcagcctcccaaagtgctggggttacaggggtgagccaccacacccagctgttcttcctatagctcttaaggcagatactgttattcccatcacacagcttaggaaattgaggctccaggatgttaggcaacttatcaaagtcacactgtgaatccaaggttaggatctaggtctgggccaggcacggtggctcacgcctgtaaccccagcactttgggaggccgaggcaggtggatcacctgaggtcaggagtttgagaccagcctggccaacatggtgaaaccccatctccactaaaaatacaaaaaatcagccgggtgtggtgacacgcatctgtaattccagctacttaggaggctgaggcaggagaatcggcttgaacctgggaggtagaggttgcagtgagccgagatagtgccactgcactccagcctgggaaacagagcaagactccatctcaaaaaaacaaacgaacaagcaaacaccctaagtctgtctgctttttccacagcaacacactatgtctcaaggctccagccaggcacactgatgtctgggggaaaagcaggagaggtcctgagtggagatgagcccccagaggacttcaggtgggggatacaagaggatagcacctgcccttcgtgccctgccattgatttctgtctaggtgagccaagtattagtgtgaggaagcgggatggagagatacagaaaggggacgggctggtgtggccaaaggcttatctcagtccggggcactggtcaagctcaaggagataatgtccatgagtcacagaaggatttgcgtttccaccatcgccagaccgacacgctcacatgcacgtcccacctgctctgatgaccagaccccaccctcctcacctgagacgttaccacccacgtagatggctatcgtaacggccagagagccagccagaaacatggtgaagaagttgcctttggtttctccactggtgacagcctgggccacagctccttgggtgaggagctgctgagaagaggagagatgaggaacagggagcccaggagtccaacagggagaaaggttgggaaggccaggggagcagccaaggagatgaatgagcacggaagacaagcaagggaaggagaaaagcagaaggagggaagggaaaagaaatggggaaagtggaggaagaagaaagggaaagaatgtgggaaaaaaggaagaaaagtgacaagaataaaaatgatgaagtaggagaggaaaggagattaggagagacgagaggatgcaaatgaaaactgatagggagttgagaggaagggggacgccaagagaaagagatgaggacaccagaaggagccaggaacttttgcccaccccccttctttccttcccccagtgaccctacctaccatgagtacaaacacacccagaaactctgccaggcactgccgggccaggaggctgcatatccggaggtggcccatgatttcagccggggcctgagtgaagaccatggtggaaacaccctgttgctgttcactgctccctctgtctgcataggcacactgccactgtgcagctactgcctgtccccagcaaagataaggaagagactgttgcgggaagttagggaccccaaacggagggaccggctgaagccatggcagaagaacgtggattgtgaagattttatggacatttattagttccccaaattaatacttttataatttgttatgcctgtctttactgtaatatttaaatataaattgtgaagattttgcactttggttcacacctataatcccagcactttgggaggccgaggtgggcggatcacttgaggtcaggagttcgagcccagcctgactaacatgctgaaaccctgtatctactaaaaatacaaaaattagctgggcatggtggtaggcacctgtaatcccagctactcagcaggctgaggcaggagaatctcttgaacctaggaggccgaggttgcagtgagctgagatagcgccattgcactccagcctaggtgacagaacgagactccatctcaaaacaaacaaacaaacaaacaaacaaaaaccattagctcaattcctgaacagcatctactgtctgtgcacatgtgtaggctaggaaacagagagataacaggagaatgtctgggagcaggctatgagcacagaatctgaagtttgcccaatctctgtctcttctatccttcattcccattcatcacaggactagcctcccctatcctgacaaatggaaggaagtaccctgcttcatatacgttagatctcttggtcctgaagtcagctctgcaaaatagtactattgcttccattctacagatgaggctagtgggccttagaactccccaagatcatacaattttttgtttctggtttttgttttttttttcagacagtcttgctctgtcgcccaggcaagagtgcagtggcaccatcttagctcactacaacctccacctcccaggttcaagcgattctcctgcctcagcctcccaagtagctgggactactggtgtgcaccagcatgcccagctaatttttatattttttagtaaaaatggggtttcaccatgttggcccgtctggtctcaaactcctgacctctagtgatccaccttccttggcctcccaaagtactgggattacaagcgtgagccaccatgtctggcccaagatcacacaactatttcatggctgagtgaattcaaatccagatcttctgactctccaactggtaacccacaaagcctctcatttagaacctgaagcctttccccaaaccatttggatgcttgaagaactcaataggcatc

SEQ ID NO: 79 - DNA, 44635 bp, Homo sapiens
ccagcagagggttcttagatctcgagaaagaaagattttgaggcaaatcaatagagtaaagtgaaagcaagtttattaagaaagtaaaggaataggccaggcaccatggctcatgcctgttatcccagcactttgggaggctgaggcaggctgatcattcgagctcaggagcttgagaccagcctgggcaacatggcgaaaccctgactctagtaaaaatacaaaaattacccaggtataatggttcattcctgtaatcccatttacttgggaggctgacgcacgagaatcgcttgaacccagaggttgcagtaaagggttgcagtgagatgacaccactgcactccagcctgggtgacagagtgagactctgtttcaaaaaaaaaaaaagaaagtaaaagaataaaagaatggctattccataggtagagcagtggcatgggctgctcaactgataatatggtttggctgtgtccccacccaaatctcatcttgtagttcccataatctccacttgttatgggagggacctggtgggaggtaattgatcatggaggccgtttcccctattctattctcatgatagtaagtactcacaagatctgatggttttataaggggcttcccccttcactgggctctcattcttgccctggctgccaccatgtgaagaaggacatgtttgctttcccatctgcaatgattgtaagtttcctgaggcctccccagccatgctgaactgtgggtcaattaaacctctttcctttataaattacccagtcctgggtatgtctttattagcaacatgagaacagactaatcaagtaacaattgattatacttatagttacttcttggttatgtgctaaacagggggtggattattcatgagttttccaggaaagggtgggcaattcctggaactgaggggagtgttcctcccctttttttaccatatagggtaacttccagacactgccatggcatttgtaaactgtcatggcgcaggtgggaatgtcttttagcatgctaataattagcacataatgagcagtgaggacaaccggagatcacttgtgtcaccatcttggttttggtggcttttggctggcttctttactgcatcctattttatcagcaaggtctttgtgacctgtatcttgtgctgacctcctagctcatcctataactaagaatgtctgatctcctggaaatgcagcccagtaggtctcagccttatgttacccagaccctattcaagatggagttgctctggttcaaatgcctctgacaataccacccaaactcagacaagaaaggctactgatgcaggctgatctagggagctcccctcaccaccaccaccatgagccctcttctggccatacccctcccataaaatgatgagtcaaaggggccgactggacttgcccagctggagcccacactgcctccttctagaccagcacactcaaattgtggcccttgaactgctgccattcaacagatggcttgttactggaccacaatgagccaagtatagaaatgaaaagcagcagaggcgaggcgctgtggcttacgcctgtaatcccagcactttgggaggccgaggctggcggatcgcctgaggtcgggagtttgagaccagactgaccagtagaaaccctgtctctattaaaaatgcaaaattagccaggcatggtggcacatgcctgtaatcgcagctactcgggaggctgaggctggagaatttcttgaacccgggaggcggaggttgcggtgagctgagataatgccattgcactccagcctgggcaacaagagcaaaactccatctcaaaaaaaaaaaaaagaaagaaagaaatgaaaagcagcagggcaccgggcgcagtggctcactcctgtaatgccagaactttgggaggctgaggcatgcagatcacctgaggttgggagttcaagaccagcctgaccaacatggagaaatctcgtctctactaaaaatacaaaaaacttagccggccacggtggcccatgcttgtaatcccagctattcaggaggctgaggcaggagaatcatttgaacccgggaggcagaggttgcagtgagcagagatcgcaccattgctctccagcctgggtaacaagagtgaaactccatctcaaaaaaaaagaaagaaaagaaaagcagcagggtgcagtggctcacacctgtaatcccagcactctgggaggctgaggcaggtggatcacatgagatcaggagttcgagaccagcctggccaacatggcaaaaccccgtctctattaaaaatacaaaaattaggccaggtgcggtggctcacacctgtaatcacagcactttgggaggccgaggcgggcggatcacaaaatcaggagatcgagaccatcctgactaacacagtgaaaccccatctctactaaaaatacaaaaaattacccgggtgtggtggtgggcacctgtagtcccagctactcgggaggctgaggtaggagaatcacttgaacccaggaggtggaggttgcagtgagccgagatcgtgccactgcactccagcctgggtgcaagagggagactccgtctcaaaaaaaaaaaaaaaaaagaaaagaaaaaaagaaatgaaatgaaatgaaacaccaagcatttagaaacttttatcacaattttactttgctgcaacatccaagctcctgatcattttccattttccaggaatttgttttcattgtattttataaaagtatcagccagcctatcacagattggaaattttatttatttatttacttttcaagaagggaaagaaaggctgggcacggtggctcacacctgtaatcccagcactttgggaggctgaggtgggcagctcacttgaggtcaggagttcgaaaccagcctggcaaacatggcaaaaacccatctctactaaaaatacaaaaattagcctggtgtagtggcacacatctgtaatcccagctacctaggaggctaaggcaggagaattgcttgaatccaggaggcagaggttgcagtgagccaagatagtgccactacactccagcctgggtgacagagactccaactcaaaaaaaaaaaggaaagaaatttaacagattggaaactttaaaagctggttattcacctgaagcactattctagactctggcatttttctatccaaatggtgttgagttcatttccaaggactctgcagccttctgcttcaggtattctctggcaaacagacccatctgccagtgtgcacacctggctccagtaagtggccaggaacagctgtttgcaggggtgcaggtggaacttggacttgtgtgctggggtgtgctgcagaagcaaggaccctcacagtgtagaatgggacagggagggaagtgggaagaggaggggcaggctgggggctgggaggccaaaggggcaggttctaaatttaaactgacattccaagttgttaggaagatatatctgtcaaggtaggaagacacagcctactttgatctcataactcctctgtactcagacacgtggtacgtgggcctccatttgctacttgccctgagtcccatgaacattcagggcagggctgcctgaagcatccctaggtgaacagctgaggagcctattaaactgcatgcactttgtaaaagcacataagcatttcatcacatggcttcactggattttcagaggtgaacctgagccaaaagtatgaagaaccgcagtcccagacattgcagaaaacatgacagggcaagctggccggttctactatgctggatccaaagccggggtccaaggttgtctcacccacttctttgtgtgagggtagacctagagaacagccagcatctgggggtactaaggatgtctcctatagtcttctggtatcctttgtacctccacagaatagactttctgcgtttctagaaatcttcccttcccctgcagaggagaatcaacccccaggcccaaactgctgcatgtttgcttctagccccagcggttctccaggtgttgtagaagcagccactcagctatgcagctgcctgccttccgccccaggggtgtccctccctgcgtggggagcccaggcacagcagcaggcgcccagaaggttctggcagaagtgctgcacccaaggtagtaggggaccaggaagagatgaacccccagcttgtagctgtgcactgcggggctgcgagtgaaatgaagagtggcccatgaggaaggagtggagagtgggacatggtcctttccttccacctgtcaccccctcctcacctcctgcctgcccttgagtaaacctgggcatcctctcctccttgccccagtcctggaacccacacatgtccctgctgggccccggggggccgaaaacacggcttaggcctccctgtcctattcccagtggcaggatggaagatttctgcagaatttccagcccaggccaaactcaggctgtgctaggctggaggaactccctctttctgtgtccaaaaacactcctttcttaagaggagacactccatcacgttttggagagagagagagagggaaagtgtgtgtgtgttttgttttgttattttatttttttagaaggagacttactctgtcgcccaggctggagtatagtggcgcgatctctgctcactgcaacctctgcctcctgggttcaagccattctcctgcctcagcctcctgagtagccgagattacaggggcacgccaggacacccagctaatttttgtatttttagtagagacagggtttcaccatgttggccagactggtctcgaactcctggcctcaggcgatctgcccaccttggcctcccaaagtgctggggttacaggcatgagccaccatgccgggccactgtgtgtgtgtgtgtgtgtgtgtgtgtgtgtgtgtgtgtgtgtgtgtgtgtgtttttttagatggagtttcgctcttgttgcccaggctagagtgcaacggcctgatcttagctcaatgcaacctccgcctcccaggttcaagtaattctcctgcctcagcctcctgagtagctgggattacaggcgtctgcccccatgcccagctaatttgttgtatttttcgtatagacagggtgaagccattttagtcaggctggtctcgaactcctgacctcagatgatccacccgccttggcctcccaaagtgctgggattacaggcgtgagccactgcgcccagcccagtgtgtgttttaatagactagtattgggaaagacttccctctctcagcccggcaagataagtctacaccctccccaggcgggtgtccagcagggcagctcccagcaactcactgagaactggaaagtttccaggaagggttgggagggtcagacaggtcatgtttctcactggggtcaggacacagtccttcaagataggacactggagcagagataagcaggagaactcagctccttccttcagccgcagagcccagtgtttagtacatctccatcaatggcttgcttcctctgaagtagagactgcagtgggtagtcctggtgctttatcagtgagtccctccctcatgctctgcagggtggctacagtgggaggctgcagctgcctacctaatctgagcactctggtctctccagtttctcttttggggccaaggaaagtgacattgaacctttgtggcagaatttctttgtgttttgagtcccaacctagatggccccgctttggggacagaaatatggctgtcgtgaccctgcctgggtcacaatcactgggaaacagtggctcaggacattgcagcttaatcatttcatgctccacatcaaagaagatgaaatatatgatttacagtgtggtggccccagagcagaggttgtagggttttctccaggacatgtgtgtctggctttggtgactggtgagatcgcgtgctgctcactgaaatagaggatgcgggaggagcaacaggtgttgggaaaaacaatgttcagtgtggggtatgttgaataacaggtggtggtgggtcgtcctagtggagaggtccaatggataattgaatacaagggtctggagcgtggagtggaaggaagaagtccaatctagaggtgaacaatggtgactctccatttaattgttaaatcttatttgtttaaacaaatcttatttaaaccatgggtttgcatggggaccttcaaggaccctgcacagaagagaaaagcttagagccaagtatggagtcctggggcatggtaggaagaagaacagaggaaggagctccaaggaaggagacagaaggatcaaccagagaggcagcagttaaaccaagagaaagtggaacaaagtcagcagagggcagagtttcaaggagaaggcagccaacacagtcaaatgactaagagattgcaagtcagatcagacctggaaatgccttctggacttggccaacatgaaggtcaaaggtgattttagtgaaagcatttcagggactggtgaaggagatgccagattacaggcagtggaagagataacagagaggctaatgggagggacacagaccacaacagagttgataggggttaggggtcaggtgagggggaagaaaactgagcaggctaatttggggaaggaaagaatcaacggagagggaaatgaaggcagggtcaagagaaggtcctggtgaaggacaatggaaggtgcagtggtgggaggaggggaggggcggggccacagggagcgggacaggagagtccagcctccccaggcaggggaaaggaaaggggaaggccggcgtgcctgtgcgcagtgagatttgtagttgagaggaaagccgcagaagttatttgctccgtgaagtaggaggcagcaccatctgctgagggcagggtgggaggcggtggcaggagttgagggaggggcaggagaatgaggttcccagcgtctcctcgccgtgcagaggcgcctgcggagggagcccgggcagctgccgctcctcttgctccgtggttgtgtgctgcccttcagcattccacagctcaccctgggagacgctgggctgacccaaggctggaatgttccggggcaaagcgacgagtaccagaccacgggctccgggctggattgggaagcaagtaagggttcacatatggaagcaagcgaccaggaggaaagggaggggccgtagttttcgctgggagcacagatggaagcgggaagaactgaagaatatggatggccaaatgctgaatgaattgtgagagttcagaggtggagctcctcccgacggcagtgggcgcccatgggtgtgtgctgctttagtggagtggagaggaacgcccttggagataagcaggctcagtggaacaaagctgcggtatcggacagacttcacctccacgcactcagaaaaggcactaggacgatggggacctaggggctggaagccactcccacaggagcccaggtgctcagtcagcgcagggaaggaagaccagggatgcctgcggcagaggggagaaaacggggagcccgagtgcccggagcctccgtggaggcgtgtgtctatatcgcgacggagaaaacgcgtccccaagaggcaatgaaagttaaaatgacattggccctgcccctcagacacacataataggatcctgggtgcaggagagccagggtcagcgagaggagccaaggaagacattcccagtggctgaacagacccccaacgggaggccagcgcagtgctgaagacctgtcttgtgggaggggtggacttggggcctcaccagcctcaagggattaaggcttctttctgtgtttcgggggtgggggcactgaagccagatgccacttgctgcccaaagctcagggttccagacagaccccaaagaaaggcttgtgtggactggacagcctctccctgggtggaggtgggtgtcaggtggtgttcctggcggtctgtggcgggattcccgccaggggccgtttctcctgaagagggaaacagatcttatcttcacatcttccccccatacaccctccgctcccccaccctttttttttttttttttaatacaggcggggtctccccatgttgcccaggctggtcttgaactcctgggctgggctcaagtgatcctcctgcctcagcctcgcaaaatgctgggattacaggcattgagccaccacacccagtctacgtttttgagaaggattgttccataactgaagactggctgggtcagggggaaattagcctgcgggtggggctggatcatgctgatattggccatcggcggaggaagctatacttctttctcctcaggccagcactaaccctggccctgactcctaggaccccatcctcatccgccctcccttccctggaggaaagctccctttaatataagactttagcttccttgatactcacttgagaagccaggaagatgtgaggcatgcggaaaagcgcagagttaaaaaacaaaaccttacaatatttaccaggtactttccctacacacacatccatctggcgtgtgttagggatgacaggttggcctgcgtttggagaaaggtaaacagctcaaggtcctaggcacccagccaaagtccatacgatatgccgctcagtaccacccactgccccgtcttcatcttcagctgaaactcagatcccgggaggtctgcaaatggatgaggtgctatcccacaccagtcagattccaatttgtccaagatatcccagatctacccactcaattacatttaagagacagtttctgtctttactttcaccaccagtcttggttaaacatcagaaaagagacaaattacacacttctcagaaattgaaattttataaaaaggcatttttctcttatatccataaaatgatataatttttgcaagtatagaaatgtgtcataaattataatgttccttaattacagctcaatgcaacttggtactttcttccctccctaaaaaacgagagagaaccaaaaaataatatatatatatataactgtatatatatatttatataatatagacaaacaaaatatgaaaaaaaatcatttcctctttggtataaaaatcagactctcaccttgagagacacacagacagacatgatactgggtttgtaaactgtgtggccaaaagggatttccctgccaagacttcccctctcccattccctgcccacccgcccccacctcactgcagcccatccagttcctttggggctcccatatggaacatttaaaatccccctacccactcccagctccaaaccattcctgaagaatcccccgacccactatcaaagaagaggaaaggattcttctcaaggctgattaggtagcgactaacttgggaaatgccttatttagggaatagcttcataggtgtggatgaagtaaaggacaggctgtggccaaactctgacagtgtcccatccagaccaagccaggcactggcctgggcctggttttgcccttatcctcctctactacccggcacaaggattccaccacctcttgccagaggctgggcctgaggggcggggctccttgcttactgaagaagggagcagagaggccaattcccgttccagcctcatctcaggtgcacagcttccccctgcagccccaccacagggccctggggtgtagatgcaagaaagcaccagatggggaggcaaagggaggtcaaaagggagtctgccaataaacttgggtttaaatttaaaattaaagaaaactacgcctccctgagctgggtgtggtggctcacgcctgtaatctcagcactttgggaggttgaggtgggcaggtcaggaggtcaggaattcaagactagcctggccaacatggtgaaacatctctactaaaaatacaaaaattaaccaagcgtggtggtgtgtgcctgtaatcccagctactcaggaggctgaggcaggagaatcgcttgaacccaggaggtggaggttgcagtgagctgagattgtgccattgcactcttgcctaggtgacaagagtgagactccatctcaaaaaaaaaaagaaaaaaagaaaaagaaaaaagaaaagaaaactacccctccccactgaccaaatttcagacccagctttagctcactaaggatttgggggccactttcctaggctccagcccaaggccagcaggactaaggaatccaggaattgatatgtgtgtgtgttgggggcagagggcagcactttactctcaaggtgaggaagcagacaggaccaaaccctcctttacactctcccactaccctctgctcatgggtacctccctccctggtcagctcctctgccccacagagcactggtcactgcaggcagagccgacatggatcctcccaaaccaccccacagccggccaggctgcggcatcccagtgtgtgccagcctccttttcccaggagagttaagacaccaaccacaacataaaagtcacataaaagcctcctccacttgccaaataaaaaaagacaaaaccaaactggacacaacacaaatcaaggagagacatacacgatgtgaggggccgaggcccctgcaggtctctggcttcccggcatggtacattcttatgtaattcaggaacagaggcactagggcccctctggggagtaggagtaaaaaaataaggagattatagtctccctgtgggtcccaggcagggcaggggcagacacaatctctcacagttttttcttgtttttggttccacttctggtccccgagtggggctggctccccgtgcctcagcctctgctctgcccttgggcctgctccctctagctccccagctggtggaagggcctacagctgggaacagatgtcccagccatgtgtggtgggaccagcaggacagagtctaccggggggacgggaagcaaggaatgaggaccagcagttccgagacgctgttccctcagtgactggccagccctgggtgctctggtcactggcacagggcatccatcctcggccttcagcccttgaggggcttgtcggcaccgccactggggctactggcactgtcactcttcttcctgcgcaggctctcaatccagctggagctggagcgggtggtgaagctggagagcgcgagagagctcagccgcatgttcttgccagacatgatgagctccccgaagccctcctgatgggagaaggcatagccggagcgccgggagccagtgcggccaacccgccgcatgcagcggtgctgggccttctgcttcttcctcacgagctgtgtgtagcggacctgcagaggggcacagggaagagccctctgtcagcgtggaggtgtcagatatcgccaaggagaagggacccacagcacccgggaccaggctgacacagaggcctccgacccacagcacctgggaccaggctgacgcagaggcctctgtggccagctgcacagggtgtctgtccccaggaagaacagataagcaccaacacactgaacagccacatggccccacagagccccccagtgttcacacgaggcctttccagccaccccatctctgcctcccacagcaggtagcctggcttctcaccgtgtcggagagatccggcttcaggttgagcctgaggaatcggaaggcaaccacgggcatgatgcagacgactgtggtgagcacaatggtcagccacaccgtgggctgggccaaggtgttctgggcattccctggggatgaagaggagtcagtggccttgggagtcacgaggcagacattccccgttcccatttctggcagctccacttccctactctcaaagcctaagtcacctctggcttcccgcttctccaggctcaccctccaaatgtaaatctccaaatttagctccaaactcccccaaagctccagacctgctgcttcaactgccagacttgacataccaggcatcttgaatttcccgtggcccaaactcaactattgtttcctttccccaaatctgatcctggtctttctcaactcaggaaatgccacaacccattcagttgctccaactaaaaaccctgcaatggatcttgattcatttctgtaaaaatttttttttaatttctgtttttttgttgttttttatcttgattcatttctctctcttctttggaccccacattcaatctattggttccattttttttttttttttttgagacagagttttgctcttgcccaggctggagtgcaatggcgcgatctcggctcaccacaacctccacctcccaggttcaagcgattctcctgcctcagccttcccaagtagctgggattacaggcatgtgccaccaagtccggctaattttgtatttttagtagagatggggtttctccatgtgggtcaggctggtcttgaactcccaacctcaggtgatccgcctacctcggcctcccaaagtactgggattataggcttgagccaccgcgcccggcctgttgtttccattttcaaaacatctctggaatctcacggccttttactctattccgagccctcattaggctcacctggtgactgctctcacctcctagtctcccatttccacccttgccccctacactttattatccacgaaactgtaagagcggccctttaaaaacataagtaagcttctggtatttctctgctcaaagccctccaatggcttcctctcacatttagattaaaattcaaaaactcaaagttcttcctctgacccataagggcttaaataatcctgactcattccacacccccaccctccaactcatttcctccactcctccccagctccacgtgcagaagacctcctcccaggccagggctgaaggcctttatattgctgtttcctcttcctggattgacagttcccagagagccacatggcaggctccctttccctttattcagatttctctgtgctagctgggcacggtggctcacacctgtaatcccagcactttgggaggccgaggtgagtggatcacctgaggtcaggagttcaagaccagcctggccaacatggtgaaaccctatctctactaaaaatacaaaaattagccaggcttggtggcgtgtgcctgtaatcccagctactcaggaggctgaggcatgagaatcgcttgaacccgggaggcagaggctgcagtgagtcgaaggctgcagtgagccgagatcgcaccactgcactccagcctgggcaagactccttctcgaaaataaataaataaataaataaaataaacagaatacttggcacataagaaatgttgaatgtgcagattagctgatggtcctgttagtcccagaacagctgtgattcctcaccgattcaaggaggccacggggacttacccacaaaccggaactggttgggaaacatgtcgaagagcccattgctgtgcatggcaaagaggatggcaaagtaaacagcaaggcttccccagatgaagaagtggttgatggccgtccagtagcctgtgtcgagcccaatctgcagaaagtaggcatagtcaggcaggcgcacgccctaaaagccccttcccccagaaacagaactgtggtgcccagggcagccccagggacagaaggctcactccttccagagaagaggggagttcctggatggcctcatacctgcacgctaaccacaatgaccaaggatgtggccacagtgactgcaaaggactggtagtcagccagctgagtgccatcatcccgggtggcatcagcaaacaccccatagggaatgaagaacatgagcacggaggtgtagatgccctgggcgatgcagatgaagaactcccgcttgttgaagagaaggttcagctggcccggctcatacagcttagggtactccatgctccgctgctcggggacatcctgtgtgggaggaccatgtagcatagggggcctcagaggttgccgttttgaccctggatgaccaagggcagactctgactctgtccctgcctcctcctttccaaagtctttggcagctagaaccaacctcaagccagctacccccagactaacttagttcagcaacccaagagagttctagatcagctgcagccaggagggagaaccagccacaccttccccggctgaaagaactgccttcccagtggccacaggaaatgggcacaagtgtcacacaccacgtctatgtgactccttcaagcagtgaccttccccgcatcccatctgatcatcaaactcccccatacctgatcaaagacccccatagccaggactggcagggaggtgtacacgatgttatacagggtgatgaaatactggtcatagacggtctggaagagaacagggagcaagggagcatgcaacctttctttgctacacatcaggcacaggaagacagctgatgtcacatacagagaaccctaagaaattttctgaggctccttctctcctcctttaataagcattttttaagagtatgtaccagaaaatagctaggccctgggggactgagtgataaacaagacagaacctctgccctcaggtttacagatttgcacaacagtggactgggaacatttattacctgggctgagaagccacagaagaagccaaaccagaagtggaccatggtgaaagcaaagtttttgtagaagaaatagcaaagaaacttgcacattcgcaggtaggaccagcgcccatgcaccagcaggaggcgctgcaggaacttgaactgggagaaggagtaatcggaggccaagacagcctggatcccttcctgcccactgatccccacaccaatgtgagccgctgcagagacaagagatgacaagagggtgaagatggccaccggccacacactttagagcctaccaagttacaacccccttcccgtcattcttctgcagtccagagacctcagtgggcccctccccagcctcaagcccagcctacacacctgcacagcccacactcacttttgatcatgctgacatcattggctccgtctccaatggcaagcgtcacagccttcttgtacttcttgaccagttctaccacctgtgccttctgcaagggggtcacccggcagcagatgacagctttgcaggcacacgctgtctccagaaactccagctccatgtctgcctccagtgcgtgggcctggagcacagagaaacctgagagagccagtctttccaggagacacctgggagtctcagctcctcccagtcccctttgagaccagtcttctctgaaatcaggggaaattagaacaagatataaaagccctggacagaagtgctcactggaaagatactgcccaagctaaggatagcgatgcctaccaggctgtgaccatttatgaccagggcgtactccccagcaacggcctccaggacagaagttagcttggaagaagaaagcttgtcctgataggtgaagccgttgcctacggagcgggatgagtccatcatcttctcccgggctttcctgtcgaggtggaaatgatacggttgtggtcttccagaacggcagtggggagcagggattcaagtctaaatggtccagaaacccccacctgagccctgggcacaacgcacagcaccgcctcccctgggcttcttgtttacctgagctcctcccgcacctccaggacagtatggccagtgactatgaaaacctcagtcatgtcatccgtcagcatcttgcaggaatagccgatgttcacagccgtctctaccaagagagaacgcaggagctacggacaggcacccaacaaggtcagcacacttgcctgcctgatgtcctcggctccatgcaagggtccaacagggctactgtcagttgcaactggctctgccctgctgggctctcaccttgcttgtctccggttagcacccaaatcttgatgttggccagtgtcaggagggcaatggtctctggaaccccttgctgaagtttgtcctcaatggccgttgcacccagcagctgaaaataccacaaggattcctggcacaagaattgcaggcatgagccctccgtgcccatccttggcccgtcccgcagcccgtaccatcatgttgttctcaacctcctcatagatgctagccagcctgtcctcccggctgtcctgggccaggctggcctggaggcgtcgctcagcccactcctcgtagtactcttcatccagatccttgtaggccagcaccagggtcctcagcccttcccctgcgtactcctggaggcagagtggaaaggcacacctgggtaagtctggagagctaatggacagcgtgagggcgacaatgaataatcctgcactgtagactgggtgtgtgccacattccacagttagggactgtcaccacatacataaaaagaggtaactatgggagctggctgatgtgttaagttgtctgactgtagtaatcacttcactatatatacacatcaaaacatcacgttgtagaccttaaatttacacaataaaacaaacttaagtcgcctcccccacactaagagtagaaccccccaggctggcccctcctctcctcacacccacattaaggtggtccatggtggtgttgagcagctcttgagtggagtggtgcagtctgtccagtaggatagtgtcagcccctttgcagtagagtcggatcttcccctctggattccgcactatgaatggggcaggtgaagaaagtgccagaaaaattcagacaggcaaagacccccaacataaacacatcaagagtcacccggcacacttcacccattccaggcctgaatgctgtccccaaacgccccagcaccccaggcctggcctcacctatgaccgacatccgcttgcggatgttgttgaagtccaggatggccagcagctggtaggtgatggctgtgcccatctcatggacggtgattgttttgggggtgcgagagcggaaaacaaaaccaaagttcctggctgcggtgaccagggccccctcatctggggactgagctttgtagtacagctctcctgggtggggaggaagaatacacgtgatataagtggcttccctcagccacgtgccccgcccaggaagccccagcccagccgcattgcagagcagagcagagcccaagggcagagtcaggtcaggagagtgcgagccggctcctcggcccaccttcgttcttttcttctgacatgacagtatgacacagggaaaggaggcggaagaactcatgcgtgtgggggtccccgatcttgacagcctccagcaggctggggtcccaaaataagaacttcttgtcagccagaggattgaaggagaagtcaacaggttcaggcctctgaaacacataagaaggctcttaggaaaggctagagtgccaggctgcatcccggggaagggttcatccctgccctcccaactctcagtaggctcctgtccacggtggacctcaaaatttccacttccgtcatcaccagttctgccttaaaacacccatttctccaagcagcttccatttcctatccagacaacacatcactcctgactacactgttactggccaggcaccctgtttcactggcacatagaattagggagactgaatcttacctctcccaattcagctttgtgtcccaggacgtcaaacacatcacctacatacagccagggcagaaaaagaagcaatgtcagagccagagagctccagagcatggaaaaacatctccaatgcagaatccccgtaggcactgagcccctcaaccctaatcgctgagcagctgtcacagtgtgagtcactcagtcacattgctgactcgcgggataggaggcatcaggcaccctagattccagaaccccaaggcctggccatgaaagagccccggcacccactgctcaccatccctgtctctaccctaggcggcacccccctcagggcagctccaattccacacctcccaggcctccttgcacccattagacctgagcagcagacaaggctcagacactgaccgaaaggcatcagtcagtacagaaagcagtcacaagaggggtccacactctgcataaaagtcagccccacatgctgccccaggccatcccagcagcacagccacgggccacactgggaagtccaaccacagccacattccacagactcacaaggaccctgagcagcaacaggggagagtctagcagggttccgcctggccaggatgcccagaggccagtgtctcacttcaaacagccaaggagctcccctaattcctggagctgagaccagggtcagggcatcaggagaggacaaggggaggactctcagaatctaatttttttttttttttgatagactttcactcttgtcgcccaggctggagtacaatggcgcaaactcggctcactgtaacctccacctcctggattcaagcaattctcctgcctcagccccccgagtagctgggaaaacaggcacctgccaccacgcccagctattttttgtatttttagtagagacggagtttcaccatgttggccaagctggtctcgaacacttgacctcaggtgatccactgcgcccagccaggatctgcttcttgacatgggacacagaatggacctcttctttgtgtgtggatttttctcgagagacagggcctcattctgtcgcccaggctggagtgcagtggaagatcatggctcactgcagccttgacctcccaggctcaagtgatcctcccatctcagcctcctgagtcactggccagctgagaccacaggtgcatgccaccatacctggctaatttttaaattttttgtagggatgtggtctcactatgttgcccaggctggtctcgcattcctgggctcgagcaatcctcccacctcagcctcccaaagtgctatgactataggcatgagccaccgtgcctggccaggatggaccctttcttctaggcccctcagacccaactaggaaggaagaaaaaaccaatgttaaggaaactgtggggccccagttccactgtccttccaggcgaggtgcaagcccccagtccccagtggtgccaccataccatagctgtggccattgatggagcacttgttgaaaaccatgatgttctgggtgagggtgcccgtcttgtcggagaagatgtactccacctggcccagctcctcgtttagggtggtggtgcgggcttctgcaggcgtccgcttcttcatgcagaacatcttcttatcccagttgatgaagtagctgtggcccagacggatgacctccacactgcacaggggacaagaggtgaggcttgggtcgggaagaagaggaggtgccccacccacatgggccttcgctgcaggccctccgcctggggagagacaagaacggagaagacacctgggcacagaaacctgggtgggaaagggcaaggagagcctgaaggtggagccggctgcacacagccagcagaggaacgccccgacccgaccctcctgatgctctccagacaagaaggtgcaaagggcctgggtgggcaggacagacagcaaaggaggaaaaggggctgtagacaaggcactcggccagttcttacctcaggactaataatacagaaaccatgcagagaaaaacaagagaaagtgccagagggaggggagagaaaagagagagagaaataatgagggtgctgtgcatgccacagcaacacagacgccacctcaaagaggggtggcaccggggaggggaaatggagaaggcttgaagcccactcgtcactgtcccaccacaggctgggtgcgctccttccaccctgggcttggggcactacattcctgattctgaacaccgggcagggctgaggtgctgactccagagggagagggccctgggcatctgcagaacaccaccacttcacaatggcacagcgcattgtggtggttgttgtttgcttgtttgttttttgagctagggtctctgtcacccaagctggagtgcagtagtgtaatcatagctcactgtagcctcaaactcctgggctcaagcaatcctcccacctcagcctccctagtagctgggactacaggtgcacaccaccacacctggctaattttcattttttgtagagatgggatctcgctgtgttgcccacactggtcttgaattcctgaactcaagagatcctcccgcctccaccgcccaaagtgctgggattacaggcgacagccaccatgcctggcccctatagtgcctttaacatctccaggtctgttcgtatcctcttctttgctaatcatatgcactgttagcatttccagaaagggccatgtttaggtccagtgcagccgagcaatggggccctatcgagagccctgcttcccacctgactaaggcacctatcaggatcccattaccaggcaaatgggaatgtcttcacattccaaagggccttttcctcacacagctcttcaaccccctcttagcctcccgaaacatacacactgtgacctgatgagactcagaaagaaaactgctttagctgctcccaagggcttcaagtgaactgagatacaaaacacagatagcaaagcccataggtgggaaaacaaaattaggttgtaagcacaaaggcatttaaatagtaatgcagaagggagtggcaacagtcacaatgagcaggctaccacccagtaactgtacagtcatttaagtttaaaatgtatcttctaagccaatatcttatatcaagacatcctattaaaaggtgagacaagtactcctgttcctgtttcacgtgggaaaactaagatcaagtgaggccctgagtgaccgtggattttcctgaggtcacatggccagtgaggaggcaggactaaacccagaacctcccaactctcctcttcacaccctggaaaagcctaaactatattctctcagcacagaaatgctgtatcttctatttattatcaccagcagtaagattgggggctgggagagagttgagggctatttggggaatctgtatgaacaaaagatgggagacaggacaagttttcagcacctccataaaacatttccttaaaaatgtcacaggttcccttatctcaagtgcaaggcactaagcaagaaagttcctttcccctggccattcctcctgcctcgtcttcctccgatcctccccttcattctcactggcctgtccctgctaacattctctttacctcaaacatcctacatgttgccttgatcctattcatgctgtacactactgccagtcaatacttcctaaagcattctttagtttttttttagaatgcatttttttctttttgtgggggaggggttccagtgaaaactggaaaacctgctagacaaattctaaaagagctgtaacacttagaatgcatttttagaatacagaatacattcttttgactttcttcaaaaacttttttgtttgtttgtttgtttcgttgttttttgagacacagtttcgctcgttgcccaggctagagtgcagtggcgtgatcttggctcactgctacctccaccttccggtttcaagcgattctcctaccttagcctcccaagtagctgggattacaggcaaccaccaccacacctggctaatttttgtatttttagtagagacggggtttcaacatgttggccaggctggtctcgaattcctgacctcgttatccgcccaccttggcttcccaaagtgctgggattacaggtgtgagccaccgtgcccagtcttttcaataacttttaatggttagtaaatacaaagtccacaggcaaatattcaaaagcctccacaatcaggagcaagctatgtttccagctcttgctcttggcccaagaccctggccaactatttccataggccattcccaggctcccatctccacacctttgcttccagccctctcatcctcctctccattgtggctccaccttcatccagcccagtcaccactcaaagcccagagcaaatgccatctctccctctctgcctacctgcttagggagcgacactctcccagtccccgggcaccctgtgcctcccacatggtatctcagtctgacactgtccagatctcccctcctcgacctatccatctgctgctgctaaaggcagaggccaccttatacatctctgtatccccaagcttcacatagaagactctaggtcgaattctacagcactggttcctattttgttttataatgtgtttagattttccttcctttactagacgtaagctcctagaaggaaggagatccattcctaattcatcttttatttgtgatggcacctagcacacttctttgtacacagtaggcatgtaataaataggtgctgaataaatcaatattttttttttctctaatacagtcccaagtaccaggaaactgtggtaaaaagtttgctctgcccacaaagataaacagataacatcaaatgtttacagtacaggaagaagaggacttctcgttacttctcaaggacttcatcttcatagaaaagaaaagttctatgggaccgcctgactccctggagagaccccaggtcagagaaggcacatacctgacatagagtgaaatgggcacaacggtgttgaggatgatgatgtaggaccagaaggagaggaagccagagaagaaggcactgtccactgcctcatcccacggcaggtagacctggaaacgcatccccacctcgtgctcccagatggcattgccaatggccaggatcacccccatgcaaaccaggaatccaaaaatctggggaggaatgagaagcacaggcgaggctgacatgtaggaagccctcaaaaccaagtgcatctgtgatgtattcatcccttgagccctcaaaagctcagatgctctagtgcaagcttgtccaacccatggtctctgggccacatgtggcccaacacagattcataaactttcttaaaacactatgagattttggtaacagctgaatgttaaatgaaaaataattataaaaaaaaaaaaaactattatgggctgggcgcagtggctcaagcctgtaatcccagcattttgggaggttgaggcggatggatcacctgaggtcaggagtttgagaccagcctggccaacatggtgaaaccccgtctctactaaaaacatttaaaaaattagccagtcctgatggcacttgcctgtagtctcagctactcaggagtccaaggcatgagaattgcttgaacccgggaggcagacattgcagtgagccaagatcatgccactgcatcccagcctgggcaacagagcaagaacctgtctcaaaaaaaaaaaaaaaaggccaggtgcagtgactcacacctataatcccagcactttgggaggccaaggcgggcagatcatgaggtcaggagttcgagaccagtctggccaacatggtgaaaccccatctctcatctctactaaaaatacaaaaaaattagccgggtgtggtggcgggcacctgtaatcccagctactagggaggctgaggcaggagaatcacgtgaacccgagaggcagaggttgcagtgagccgagataatgccattgcactacactccagcctagtgacagagtgagactccgtctcaaaaaaaaaaaaaaaaatttatgagattttttttgcaatttttttttttctaagcttatcagctattgttaatgttagtgtattttatgtgtggcccaagacaattcttcttccaatgtggcccagggatgccaaaatattggacaccactgctctagtggaaaaagctcagaactggtgacaggttctagtctgtcaccaattatcatgtggccttctgtctgaccattatttcatctatatgatgaagaaactgaaatagttgattagctctcaatctggcaccttgaaaccttccagagtcctcaaagttggtaagagtggggatgagctacttttaacataccagaaaacttactgtaaataatctattcacctgggctaggtacaagccaacaaaaatgccaagccacggtaatgttcactatctcacatagatggccttttttttttttttttgagatggagccttgctctgtcgcccaggctggagtgcagtggcgcgacctcggctcactgctgcaagctccacctcccgggttcacgccattttcctgcctcaacctcccaagtagctgggactacaggtgcccgccaccacgcccagctatttttttgtatttttagtagagatggggtttcaccatgttggtcaggatggtcttgatctcttgacctcgtgatccacccacctcggtctcccaaagtgctgggattacaggcgtgagccactgcacctggctaagattgccttttttttttttaaacttgggaaacaaacttatcttcataaacgtagatttcttttttgaaacagggtcttgctttgttgcccaggctggagtgcagtggcatgatcctagctcaacgcagcctcaatctcccaggccaagcaatccccccgcctcagcctccagagtaactgggaccacaggtgcatgccaccaaacctggctaatttttcagttttttgtaaagacagggtctcactatggtgtccaggctgttttcgaactcctaggctcaaatgatcctcccaccttggtctcccaaagtgctgggattacaggtgtgagccaccactcctggtctagatttcctgattagtcaaaaatcttataaattttggagtctctggagagactggtaaaaaaccaggccactgtccaatttcctacatctatttccaaagctgcctccgctgtttaggctttgaaacaaaataggagattggtgcccaatggccaccagggggcgactggagcccttatgtgatagacaacctcgcccaccaggctgggtttccgcacaccctttaaagccagggcggaaacaagctcaccagaggctagccccagccttcacaagctggcatgtggcgggcaggcagcagacagtcggggcacaggaaggggaggagagcccaacaaggagttcagatttctagctaaacaagagaaggattcaggaactgccaaaaacttaaacagaaacttttcctttgggatccttcgttcttagaagttggggggaaaagaccctgccaacctcttccaaatggaaatttttcttttaattccctctccatccccatgaaggcctccttgtccctggcaaaagcaaacagaaggtcacatgcttcacaaagtcatcatcataactggaatcagagaagggatgatttgttttagctttaagttgttgattcatgcacgttcctgaagtttttttaaataacatcttccaactaaaaggagcctaaaataaacactgcctttgtgtagctgacctgctagcagctttaaagccaaacctgaagtctactgaccaaagaagaaagaggaaaggaaaaggagcacccaaggagaagagagggcaggggcagggagccagatgtggggcgcctcacccagagcaccagggtattcattaggcgatcgatactcgttcttttgaactttgttctgccgctgttttgcatcagcttagtgtcgggacctggaaaagaatgggaagggctgggaaagccaaataacacatctgcctctgggcttctgccctgatccccagactgcaggacaccagggtggaatagagatactggctagataagaagcctgtatacacagctggaggttttttaccttaggtattctcccacctcatcccatactcctgagtgagggctggctgagtcactcttacccttctttctttggatgctaggaggctcacctgcaaagatgaccagcccgaagcaccactcggtgtttcgcagcacacagccccgcagcagcatgttctggttgctcagagggaacttattttccttccagtagagggttccgctgaatttgtccagtttgttgttgggaggttcacagatcacttcacctgaacaggagacaagaattccactgcttaaggtccagtctacagcctaaccacaagacaataaaacaaagagaaaatgagctgagcgaagaggatgcaagggcaagggcccatccatatgctgctgggaggagtgtgagctgatgcaactcttcaggaaaataatgaagcaggccgggcgcggcagctcatgcctgtaatcccagcactttgggaggctaaggcgggtggatcagctgaggtcaggagtttgagaccagcctggccaacatggtgaaaccctgtctctactaaaaatacaaaaattagccgggtgtggtggtgggagcctgtaattctagctaatcgggaggctgaggcacgaggatcgcttgaacctgggaggtagaggatgcagtgagccgagatcgcaccactacactccaacctgggcaggagtatttaaaaaaaaaaaaaaaaagctgcagcatgacctaatatttgtttgtacaaacatgtatgaaaagtgtggatgagcacacactgactgtcaattaatgtggctacttcagcagggtagaagaggaaggaagagctattttcttcttcttttttttttttgagacagtgtctcactgtgttgcccacgctggagtgcagtggcccgatctcggctcactgcaacctccacctcccaggttcaagcaactctcatgcctcagcctctcaagtagctgggactacagatgcacaccacgacgcccggctaatttttgtattttttttttctttttgagacagagtttcgctcttgtcacccaggctggagtgcagtggcacgatcttagctcactgcaacctccgcctccctgcaacctccgcctcccaggttcaagggattcacctgcctcagcttcctgaatagctgggattacaggcatgcagcaccacgcccagctaataatttttgtatttttaatagagacagggtttcaccatgttgaccagactggtctcgaactcctggcctcaggcaatccgcccacctcggcctcccaaagtgctgggattacaggcgtgagccatggtaccgacctctattcactttttcttatacactctgtatggtttgtcttataaggaacacatattattattctgagctaataagctaaaagaataagctgaatttctctcaacatgcatagcaagtggggagctatcagccacaaagtccccttgaaataattataaactcaaaaccaagagggagccacatgacattacaaacactcccctccccaaaacagtccagggagttgcataataacaacaaaaagcccaaaggaaaatgtataatttaacgcccccaaacaaaacccaaccccactcctctaccttcaggctgctgctccaaaattactcaccgtcaaacttggcaagcttactgatgtctcccaattctgaggtgactggaatcgcctgacgtactttcatgttggtctcgctggaaggacagtatctctgagtccccgctccctcctcatcctctaaatgttttttttcacagatggggtctcgctctgctgcccaggctggagtgcagtcgcacaatcatagctcactaaagcctcgaactcctgggctcaaacaatcctcccgcctcagcctcccaagtggctgggattataggcattaaaaccaccatacccagctaagttttaaactttttaaattttttgtttgtttgttttatagagatgaagtctcaccatcttgcccaggctggtctcaaactcctggcctcaagcaatcctcccacactggcctcccaaagtgctgggatttacaggagtgagtcaccatgcccacctctccccatcctctaaattctacctggtgacacctaagcatggtgcataactgctcagcccagcaaatactggttgaataacacttcacacatcccatccaaagcctttcttacccctaatttttccaaattcagacagagcccaggcctgagaacctcattcaaagacaatctttttacctccaaagagacagaaggagagggctgacactgagcatgccacttacccatcaagttctgctgtctctatgtaacacagcccatggggctcactgctggaaaggaggaggagatccgcctagagagaaaaactaatgagaagtccaaatatgcaaacctccacccccagtgggctgtaatggtggctccttccactaagcattcttggtttgcttagttccaggtgcataaatggctagttccaggcatatcagcatgacacagaagcccctggtgtgagaaagattcctgccacgggtgtttaagaggcaacagtaaatcaggaaagattcatccttttctcacaaagaagaggaagaacctacaggcctagaggggtaccctgtcccttaccgccacaaactggttattttctagcttgataatatcaccaacacagacattcatccactgctcctgctggaggctgaggcaacgagaagacagtgaagaggctgtcaggagctaaagaggttcctaagggacccccttcgtccccagagctcttgtctccaacaggcactcacattccattgatcagcacctgagactggcggttattcacctggttatcgctcttgtggcggaactgaaaagaagaaaactgaaaggtaagacaccttcccccgcctcgaaggaattcgttgatcagtagaactcagagcatgctggttaacgcctcatacacaccccatcacaaaccagttcactccctgattccctctccccacgctcagcaaaaagacatcatggatctagctggaccgggtaagggatgtcaaggtcaccaagaaattgtgctgaatgaaggtggccatgagatgggggtggggctgggagtaggggtgggtgactgggacaaaatagaagaatgaaaaccactcacatagtcatcagtggcatctttaacagctgtgatggtgaggacaagaaccaaaggcacaatggtggtgaaccaggacagggaagagatctgggggatcaactgaaaaaaagaaagagaagtatgcctctgaggccccatctgatgccttcattccctttcctcttccttggctttattcagtttggggagctgcaaaaaatctactatgggtcacctacctgcagaatgaggaggaacaggaagtaagtgttggcaacttcctggaactgctcaaagaggttgacaggcaggaaggtgagaatattgtacttggaggtcttgatgcagttactctatggcagtaggagagaagataatgagcagtctccagtcccaacccagaaccagactgaggctgcctcccccatctttatacttccccagacctctaccccaaaagctagcaaacacaggtgtgggagggggaaagaggaggagagaagggagtctcaagggggtcaatgtattctgcttcactgacaggtgaaggcatgaaaaattcagcacgatagcagatggagagtggctgaggaggttgcttcccctcccccaagcactcttcccaggcagccctcagtcccaacggtaggttgtccttgccccattcccctctccaaacagagagagggaacaggtggtctagagtcgcttaccgcatactggaatttctcattgtattctcggtcattagcccgcgccctcctttcttcttctgcaacaaaatgatgctgcagtcaggaggagcaaactgaggtctggaccaacactttgctggggggttccctgtttttttccacagaatatcattttaaggagttagctccacaactgagggggtcatcaaattcttccctccagtccacctctcaccagcagcctgaccacacggctctccaggttacattcacaggacaggacatgttctcttttcctcaccaccaaacttcaaggtcttccactggaagcacccagtttgtctcccccacccccactccagaggaatctgagccactgacagtcctgggattccccagccccttttgctgctattactaatgcatacattgtcataatcaaggagtagcgctgaaaacgcaaagcttccttccccctggggaccactgcagatctagtcgcggtactgctctctcccttatttagagagtggggtaggtggcaagaaggaggctccctgtgccctggagctgctctgcgggagcatcccagccccatgtgcagtcccccctacaggagcctctggttgtcacatgtcaccagcaactgcttctgactggcccgaaatgacatcaccttatttcaaagctcatcttcaagtagaaaaaggtgtggggggtgcgtttcagggatatgggtcatgcagactgagatagagatagaggagggaggaatgaaatgtaattgaaacagttgctctctaactggaccttccttgtaccatctgcacacatttagctttaaagggctcatctgtcactcagttagtgacacctatctagctaaacctatctgaaacctctgcaggtctgggactgcaggcatcaaattcatgtcccagaacaaggagctgtcctataatagattccccagcccgtctccccgggggtcaccatgacctcatgctgcaaaaaggggtaacttggttaggcagcaaacctaatgccttaagcctgtccgggagccaaagacagcattccagaaccctttctacacaccccaggacccctgcagagcacactgcagtaacaaaacccaggccacagtgccccctgcctaccaagccacttcactcccataaacttccctagaggggctctcttgggccaagtcccctgcgcaatcaccaaagaccatgcaaacgaagaaggtagggactggatccttcggagccaggatctctgggtctggaaagaggatcaaggcaggtagggggaggctggggacaagtgaatgtagggattggaggggggaaataatgggtgcgggagagctgccaggcgctgcctcccgttacctgtcccccaagagggcttctttcggctccaagagggaggcgcctgggcccgggcccacttctcgggcatctccttggggaccgtcatgatcccggtttgagtgggggagggcagaccgtctatatgtccttggccttagtggcatcgacggggcggctccccggggaggtgcaggagccgcagccgctcagaggggagccccagccgtcgggcgcgcgccccacccgcagcccaggccatcctcccggccgccggcgctcggggacaccgcgagctcagctgcgccgccgccgccgccccccatgccccccggcggatgccagcgtgcgctgagtggccccggacacgccgagcacgcccagggttccgcccccgcccgctccccgactgcaggagccgcagcctgccagcgcgccgcgtaggcgaaagctcgcgcgcgagccccgcctcccctcccacccccgggccgggccaatgcgggtgagcggactgccggcgttgtcgggggcaaccgctttcacacacacacacccccgcccgcggaaaaaccaggagaaccggtagatggaaaaacgaggggagcagggaaggggtgagaggaccaagcagagatgagaacacagctccctaggccagaaagcaggagctgcaggtgcccgaagataagactgcaggtgtttcggggcgtggggctggtgctctgcgctgtcctggcagataacccagctttgggatcaagcggaagaattcggtttcctaggctgcccccaagctgggtaggggctgctgtaagctaccctccctcagacccataccagttgtcccttttccttttgctccctgagccataacaacacccactcttgatggttcccgggatctcccctccttgcctgtcttacctggggggcgcttttttgcacacactgccatctcacccagcaagatcccagcaatcccatgggagaccctgcaagaagtgacagacgaatgaggtcaggaagctgaggataacccttccctcccctcatgagacctcttttgaagaccctcttctccagctctgaccctgcccctcccccagcctccttctcccagtctctcctcttactgccatgatgggttcctgggaaagaggggacttccccaccacctcccatcatgcccctgccttgggtgacatggggggctgagactttacagaagcccatgcctgtagggaaaggagaagaggccagatattgaaaaaaggggaacagctctcaaggtatccatcccagggacaatggaggctctcatgtgttctggcggcaatgagtagtgcttgtgcttactagaaagcagtttccccaaagggtggggtggagggaacatgagccaggaaacacctggcagggcatcaggaaacagggtgggcaggctccacccttctcgaaaggcttataagttccctgccatccccaccccccattactagggcttccattatcacctcctccaggggagctcacattagaggcatggccctcactttctgcacagacagtccctaaacagcttcccctcagcctgggtcagccacccttctgggctggcagaggggtcttcccaaccctggtggggagtttgcccctccctccctcccaccccaagcctagtccagtcagtatggcacagggtgcaggcttagggagcaccagtgagacaagcctctgcctgcttccgccttcccatgtcctttctcctaaaaggttcaaggcctggccttacaaggcagagcctcatccttactccccagcctggcccaaaggaaactgccagtcagtcacctcctctttccttgtctgggtggaaggcctttcacctcctcatcctctttggttccctctgcctttagcctaccaggcacaccccaccaacctgtcagccccaagagatactaattgcctgtctggctaagctctataattacagattctggccacaacccagtcacccacaccagttctcccttcgctagctcagatcccgcccttacaccaagtcaggcaatcctgaaagccagaagtccttttcatccctgaccttctccaactatggcagtccagggtgcctggctcaggaagaaaaacctcatccatattttagagatgccaagccctcctccagggcccccagccagggtctccacccagtctgagtatgagtcacgggagggtggggagcacagggagaggttaaaggatgcaagagtgggcatcacaagttctacaggcagccccgcccttggggaggaagggatcaagaaacactatcagcctaaacatctgagtttgagtcccatgaaagagttaatgtaggagctgcacacgccatcaggagtcaggagtctggatatggaccaggaaagttgttctacctctgagaccctggggagactggaagcaggcttggccccagacctcatcccctctgggggggccatcattccaaggggaagagaggagagacctgggaactgggatcccctctcacttttccttcttagtctcacacagcctgggttttctgagcaggtcaggcccatcagccacgttgccctgccccgtcacccagccccagccccctctcggccacatttgggataaaaatagccagccccggcaagcaggcaatgctccatggaggaaaacagctcctcctataggtccggtccctgctcccttacaagcaagagccccaaaggctggccacttctttcagaggaggatggcaggtcagggaaacaggaggaaatggaactcgagacctccagctcactggccaccaacacgagctcgggccaccttccctcaccaaggacagaactcagggctcccggcacagctatcatctcccagagctactgccccttcctgacaccctcagttttcctcaggcatagacctccaccttactgagacaaagcctaccagcccaaactcccttctccaggcaccaaaccctcgggtcccggttactcctctcgcccaacaactctctgggcgggtctcccctggccaaggctgcacgagcttctccttggcactcgcgccgctctcctgctctccacgcgccccttcggcaccccatcctcccatcctgtacgcagacccccgctctgccccgtccccgggcacccgacagcccctcgtctccagtcggccgccatccccgccccgtctggccgcagctcccaaatcttggcccccggtgctccccagtctacacccgctccccggcccctccagccccgcggctgcggccgcatctccctctgccctcctggccccgcgctcccgggcgcccccgcttcgcctcgcctcgcctcacctcagcgctcagcgctcggcgcccgccccggcggccccgtactgcccatgccgggggctggggcggggggcgctcggctcggctccccacgggctcccgcccccccagctgcggccccgctcccccggggcctcggcccgctactttgtgtcagtttcggccacggcggggcggaagtgacggagccggcggcgggggccggggggcgggagggggttttggggaggggagaaggagcggggaggagggagcagccatctttgtgcggggcagtgggagggtcttagcccttccgagcctcggcgtggctgggctgggatgcccccacacgtacgtccatccgcatcttaaaagaaaaaacaattcgggaggctagatcgctctgagggggtatttttaattcggaagaagggaatagaggaacactgccttctctgcaaaacgagcatcctctgcagggagcggcaggagagctgtagaagtggtgaataaccagaattttccctggcgccaggttgccctcagcccgactctcgctcctcggagccgcccgccctccgttccttcaccctccctcctcgccctggctcatttcactgtatctcaactctccttgaatgaacgacacagcaccgagatgtctaggaacggtgcctcagtttcacagccttgctctctgtctctgtgccccgccgccctccttccctccgcccccaccacgccccctgggtggaggcggcttccccacccctaactaccctcttggggaggcatccccgagagggtgaaggtgggaggcgccgaggcgatgagagctaggagtcggcagtcgggacaggctatggagggcagtccccagggttgtgccctacactggatggtggccccctccaccctgcagatgcccgcagccgtccccatccagcatccaggtgcgcaccctctagcggttacctcgagcaactacattccgagaggccctgagggtcagaaaaccgctttgcgggaggaggggatgagaagcctgagtcctggtaccttatcctcctccacttctccctgtccaggatccttcttagtttaggaggaagggatgccaaacagataaacagagaagcctcccaggttctggcacattaacaaagaggaagaatgactgttgttcccaggcggggtcagtggctggctccagggtccatgagtgaagtgagggttgtcctaatcatagcttacactccagcatctgagctgaggcaggagtttccaactctgaggctttgtgttgagcagacaccagatcctgagctggctctgggccctcagggtggtgcagagccaccaacagctggtaagtggctgtgccaacggtggcccccaccagaggggccaccacaggcacccaccaccagccattaccagcactgcaaaagaaggacagtgggaaggtatcaggagtgactcccttagccttcccctctccaaggacggggggcagtaacaagagagtgccctaaagttgttcccagggtggtagacaccaggaagaggattgccttgtcaccaaagcatagtatttagaagagggaaccccaggagagcttggtccagcctcttgccttagggaattatctgaatatattaattttgctgatgaagtcactaatgtgcatggaagtaatgtggcatgcctaagaacacaacctctaaatcttactgtttcagtgaaaagttgggagggaagcaagggagaaagggggagaatatgacttggagaaagaacactgtcctaagaagccaagagagctattttaaaggcagagtgctgtggacccagggacagagcccttagcagaggaaggtgagtggaggccagcaccaggagagtctgtctcccacctgaagacttcaggaccccagccagccacgtaggtgaagagacgtgggcccaggtcccgggcagggttgagtggaatcccgcagttggcacccatggataacccgagggccaggatcagcatccccaccaccacaggctccagacccgcagggactcccttgttccgtctgtccaggatggccaagagccccacaatcagcatcccagtgcccagaaccttggagtcaacagaggcagagggttccctgtcagctgccaggtgctccatctgccctctctcatccaaatattccatgtcatctggctttgtgcaacacaggcagttggggatggtggggagtgccaagatagacccaacccacactccacccagagactgaacaataggctggggtgccgaggaacaggaccaaagtagtgtccccaggtctccccctcacacttacctgatccaggaagccattgttcagggacagatagggggcaggataggtggcaaaaatggaggctgtctccttggggccagtcactgtcaggttcccacctgtatagttctgtagggcatctgtggaggaagggaacacccaggatttccctctttgctcattcatccaaaaccattctgaggcacccctgcccacccacaggtgctctcaaggcacagctccctctgttccctctgtcaccatggtagagaacataggtggctcccgaagcacagaaagcagacagcaactgcaccaagatgtaaatggggagcttgacccaggggaggcgtccaacgatgcacatggccagggagaaggctggattcaggtgggccccttcaagtatcaaggaaagaaaaagagcatctattaagtgtcactgccaggcattgtcaccagacaacactactgctccttcctatagctcttaaggcagatagtgtaattctcatcacacagcttaggaaattgaggctccagatgttacagatgttaagtgacttagcaaagtcacactgtgggccaggcacagtggctcacgcctgtaatcccagcactttgggaggccgaggcagtggatcacttgaggtcaggaattccagaccagcctggccaacatggtgaaaccccgtttccactaaaaacacaaatattagccaggcgtggtagcaggtgcctgtaaaatcagctattcgggatgctgaggcaggagaatcgcgtgaacccaggggcagaggttgcagtgaacagacatcacaccactgctctccagcctgggcaacagagtgaaactccatctcaaaaaaaaagaaaaaaaaaaaaaaaaaaagaagaagaagacactgtgaatccaaagttggaacctaggtctgtctgctttttccacagcaacacactatgtctcaaggctccacccaagcacaccgatgcagtgtgtatctggggtacaaacaggagaggtcctgagtggagatgagcccccagaggacttcgggtgggggatacaagaggatagcagctgcccttcgtgccctgccattgatttctgtctaggtgagccaagcattagtgtgaggaagcaggatggagagatacagaaagaggaggggctggtggggccaaaggcttatttcagtctggggcactgttcaaggggataatgtccacgagtcacagaaggatttgcgtttccaccatcaccagacagacaaactggcatgcacatcccacgtgctctgatgaccagaccccaccctcctcacctgagacgttaccacccacgtagatggctatcgtaacggccagagagccagccagaaacatggtgaagaagttgcctttggtttctccactggtgacagcctgggccacagctccttgggtgaggagctgctgagaagaggagagatgaggaacagggagcccaggagaccaacagggagaaaggttgggaaggccaggggagcagccaaggagatgaatgagcacagaagacaagcaagggaaggagaaaagcagaaggagggaagggaaaagaaatggggaaagtggaggaagaagaaagggaaagaatgtgggaaaaaagaaaagaatttacccaactcataggcatttgagggtacaaacccatggcagggctcagctttaaaaagtcttatctaagattctttctatggaagagttccatcaaagccaattttaaaagcctatgtgaaaaataattattcttgctgcactttatacaatcatcaggccaagtataataaagcacattggtcttaccatgaaaatggtctttcataaaaatgggaaactgaagagagaaaaattatgtttcaagaactatgatacacttgttattaaagaaagaattaaaatgacaagaataaaaatgatgaagtaggagaggaaaggagattaggagagacgagaggataaaaacgaaaagtgatagggagttgagaggaagggggacaccaagagaaagagataaggacaacagaaggagccaggaacttttgcccaacccccttctttccttcccgcagtgatcctacctaccatgagtacaaacacacccagaaactctgccaggcactgccgggccaggaggctgcgtatctggaggtggcccatgatttcagccggggcctgagtgaagaccatggtggaaacaccctattgctattcactgctccctctgtctgcataggcacactgtcactgcacagctactgcctgcctccagcaaagataaggaacagactttaaaaccattagctcagttcctgaacagcagctacgtgtctgtgcacgtgtgtaggctaggaaacagagagataacaagagaatgtctgggagcaggctatgaacacagagcctggagtttacccaacctctgtctcttttacccttcattcccagtcatcacaggactagcctcccccatcctgacaaatagaaggaagtaccccgcttcatagacattagatctcttggtcctgaagtcagctctgcaaagtagtactattgcttccattctacagatgaggctagtgggccttagaactccccaagatcaaactttttttttttttttttctgagagagagtcttgctctgtcccccaggctggagtgcagtggcaccatctcagcttactgcaacctccacctcccaggttcaagcaattctcctgcctcagcctcccaagtagatgggactacaggtccatcacacctggctaattttgatattttttagtaaagacttggtttctcgggaggccgaggcaggcagatcacgaggtcaggagttcaagactatcctggccaacatggtgaaactccatctctactaaaatacaaaaaaattagcgtggtggtgcacgcctgtagtcccagctactcgggaggctgaggcaggggaatcacttgaaccagggaggcggaggttgcagtgagccgagattgtgccactgcactccagcctggcaacagagcgagactttgtctcaaaaaaaaaaaaaaaaaaaaaaaaaagacggggtttcaccatgttggccaggctggtctcaaactcctgacctctagtgattcaccttccttggcctcccaaagtgctgggattacaagcgtgagccaccgtgcccggcccaagatcacacaattatttcatggctgagtgaattcaaatccagattttctgactctccagctggtaacccacaaagcctctcatttagaacctgaagcctttccccaaaccatttggatgcttgaagaactcaataggcatctggaaagactgggctaaagaccacagactgtgggaatgaaactcacatattgagtgcttgtacttcccttatgccgagtgtcacataggttagagaatactccatctttgtgtcccctgacatggcttgacatgaggccttcacactcatgctgagttccacctggccttctctgggtgcatgctactcttgctctgcatgaagtaaccgcatcctacttcttcatatctcaaggctccaattaaatgcattcaaagaatctacgtctagacactggagaaacagtggtgaacaaaacatagtctctgcccttctagagcttatgttctagtaggtggaaacagacaatatgcaactttttaaaataccatatacagtttatgaagttcttgagggctaccattatgatttatgtaaccctgtgggctctaccactgtcctgggcacatctgtgtgactagtaaagaaataatatttctttactaggtttaatggatactatagtgctccacccagattcccccttgggagccaatatgcccattcgctacatgtaggaaataccagctgctgataccacatagctacctccctcattgggcaatgcccttcaagtcagaaagatgcctcaccgaaggttacatgccctcctatggggcccatgtcaaacactgattgatggagggatataaaagtctagcctctttgcctcactttgcgacaactctaaagggctgttccagctccagttcccccataggatccatttaggcatctgttatatcatccatgtgtgtcagtttctcctggtgcctaatcttgttacaggaaaggggtctgaatccagatcccaagagagggttcttggatctcacactagaaataattcaggctgagtgcggcggctcatgcctgtaatcctagcactttgggaggccaaggcgggatcacaaagtcaggagattgagaccatcctggctaacatggtgaaaccccgtctccattaaaaatacaaaaaaattagccgggcatggtggtgggcgcctgtagtcccagctacttgggaggctgaggcaggagaatggcatgaacccgggaggtggaggttgcagtgagccgagatcgcaccactgcactccagcctgggtgacagaacgagactccgcctcaaaaaaaagaaaaaaagaattcagggcgagtccatagagtaaagtgaaagcaagtttattaggaaagtaaaggaataaaacaatggctactccatagacagagcagccccgagggctgctggttgcccatgtttatggttgtttcttgatgatatgctaaacaagaggtggattattcatgcctcccctttttagaccatatagggtaacttcctgtcattgtcatggcatttataaactgtcatggcatgagccaccatgcccggccatgacctgtatcttatggcaacctcctatctcattctgtaacttagaatgctttaaccatctgggaatgcagcccagtaagtctcattctcattttactcagctcttgttcaaaatagacttgctctggttcacgtgcctctgacatttccccccttccttttataagagaagcactaatcctaagggttgcagagggacgaaggtccatcttctgtaagttcttcaggatgaataggggcgatgatatttttgcctaactcttagaatctctcatattcgtggtagagaggagctcagttggaaagtgttggtatgggccaggcgggatggctcatgcctgtaatcccaacactttgggaggctgaggcaggcggatcacctgaggtcaggagttcagaccagcctggccaacatggtgcaacactgtctctactaaaaaatacaaaaaaaatagccagatgtggtggcgggtgcctgtaaccctagctactcaggaggctgaggcaggagaatctcttgaacctgggaggcggaggttgcagtgagccaagactgtgccattgcactccagcctgaaagaatgaaactccatctgaaagaaaagaaaagaagggaagggaagggaagggaagaaaaagcattggtatcttgagggccattcataactcatgagttctgacaaaaggtgatactctggaagattcataagtgttcagtttaaggaaacattcagtaagcttgtcctccattcctatacaaagattacaacagctatacattccacaaccataaagcaaaataagtaaaattatcccaagtaaactaaactagaaggctttccatgaactgaggaactgttggaaccacgctgatatgaggttgctagatgattccagtacatgcccagaattagaatattgatgcagatttttacattacccatccctcttgtttcttctgagcagcagtcagaggccactggttggttcacaggactaagcagggttagcctaaattgcagaaacaaacttaaagacaactgatgagactggaatttaataacaagtgtatcatagttcttgaaacataatttttctctctccagtttcccatttttatgaaagaccatttttatggtaagaccaatgtgctttattatacttggcctgatgattgtataaagtgcagcaagaataattatttttcacgtaggcttttaaaattggctttgatggaactctgttccatagaaagaatcttggataagactttttaaagctgagccctgccatgggtttgtgccctcaaatacctttgagttgggtaaattcttcctctccttttgaggtccccagataacttggggctcctggaccttttagaaggtgacattctttacttaccacaggtcagaaaccctgtacagggactgtgtaggcaaggttatgagcccaggtcgctaagtggcttttataggctttacaagtcaagtttgattccttaatggaaagcacaccattccagtcaaacccttcataaaataaacaatttctccaattgtgtcctgttgcaaaagaaaacagattcttattacccttatgcaaataactgcattgccataaattaagaatacacacaaataatttccaaattctggagaaatcaagtagagagatgcatatactccaaattttgttcacaggagtatactttactcgattattaaaagctgtaaatatctgaaaagaaaagttgccttgactctaaaaaataaaacaaaggatcagcaatgttttaagcaaaggcaaaaagattgctttagtcttctttagtttatgcagttaacttttgtttgatatctatgaacatttcagctccccatgagagttctgaaagttgtttcctctattctaatgtcacaatctccaaagttatcagaaacctgcatttaagtgcacctgttaaagtcctatggctgattataaactaccttctaaagaagatcaaaacaagacaacaattgtctgtggatgataaaaagtcttagggccaggcgcagtggttcacatctgtaatcccagcactttgggaggcggaggcaggtggaacatttgaggtcaggagtttgagaccagcctggccaacatggtgaaaccccgtcaccaccaaaaatccaaaaattagccgcatagggcaggtgcccataatcccagctactcaggaggctgaagcagaggaagtgcttgaacccaggaggcagaggttgcagtgagctgagatcgtgccactgcactccagcctgggtgacagagcaagaatctgtctcaaaaaaaaaaaaaaaaaaagtcttaggacagccactagtaaagccacaattaactaggaaattttggttacttctgttgcatacaaaattttatgtaacaattattaataacatacgctaagtcatattagaattataggaatttctcataattttggaacatgtaccaataacacatttaatctaatgctccaaagtagataaactgaacaattttttttgttgttgttgttttttgttttttgggtttttttgtttttttaagacagagtctccctctgttgcccaggctggagtgcaatggcatgatctcggctcactgcaacctctgcctcctgggttcaagtgattctactgcctcagcctcctgagtagctggaattacaggtgcgcaccaccatgcctggctaattttttggtatttttagtagagatggggtttcaccatgttggccaggttagtcttgaactcctgaccttgtgatctgcctgcctcagcctcccaaagtgctggaattacaggcgtgagctactgcacccagcctaaaattgaacaatttttaatagtcaaagaagcagcttatgaccttaaagaatttagcaaacttaatatctgacctgtataatttagaccaaatgtttacatttttttttgtttgtttgtttgtttctttttagtcagagtctcgctccatcacccaggctggagtgc

SEQ ID NO: 80 - DNA, 65177 bp, Homo sapiens
gtttgatgaagatgagtgatgatgatgatgatgatgatgatggagtggaggtggagggagagtcctccctctcctcccctcctcctcacgacctttctctctccctcaagttgccatctgcacgaggtcagagctggaggatttcctgagtgaagcggtctgcatgaaggaatttgaccatcccaacgtcatgaggctcatcggtgagagaggggcagattcaaggggtctacaagccccatgggggccatagcagagggaagagccctgcttctggccctgggaagatcaaacttccaggcttcctgctccccgctccttcagggtcagcaggcttccccctcctagtctccctcagcttggaatgtgacctctgatcattcccagaaatagctgaggtccccaggagggctccggaaacgtccctgggaactctgctggaaacagcttctctgcagcttggtccttgccactgccactacccccaaacaatatggtggccagattggatgggtagtgagaaggagaggctggaggctggctggtggggggcttggcttccccttctgcccagcaggagtgacagggctacctggggggctcaggtgtctgtttccagggttctgaacgagagagcttcccagcacctgtggtcatcttacctttcatgaaacatggagacctacacagcttcctcctctattcccggctcggggaccagccagtggtaaggggcgtttaatcattcagtctacaaatattaactgagcatctatcaggtacccagtgctgctcagaccctgggaagaccacggtgaccaggagcttgctctcctggagcatttcttccagcaggggaggggcggatgataaacaagctaataaatacctaagcgagatgatttaaatgtttaagtgctaggaaggaaatacagtaggatggaagataaggaggccaggcagtgaatttgggtggacgtggaagatcttgccgaggaggtgaccgtgaaggagttggggctggggagatgtctggagatctgggcaggaagcgaccccaacagagcgcacagcataggcaaaggctcggaggtgggaatgatcatcgtttgtctgaagaccagacaggagtctggtgggagtgtcagtcaagggcaagaacataggcaatcaagtccaagaggaaggctggagcaagtttataggaccttgcaggccatggagaggggttgggttgaattgtcagggccatgggaaaccactgcgggcagagctaggcttgcacagagggatggagggaggagggatcgcatcaaggactctgttgacctctcctcccacctgccttggctccccagtacctgcccactcagatgctagtgaagttcatggcagacatcgccagtggcatggagtatctgagtaccaagagattcatacaccgggacctggcggccaggaactgcatgtgagtgcctttcagggacccccccccaactgctcctgcactccctgagggagttccctccctccttcttaggatggaagcagggctagacacccgctgagggcaggtcagaactcaggaccaggaaagtcagtaagggggtctgggaaggcttcctggaggaggtgagtcctgaactgagatctggaaggagcatttggatgcggagagggaagagaccagaaggtgggctcagtgcacagcatgaggtgagcaaaggggctgaggtgaccgatgggggtggggacacgtgagctgcatctctgtcccactccatgctgggtgtcttgcctggggctgccctttggaagcggccacactggataagaaaatcaaactccccaccaatggacaagcagaaaatatgccagatggggtgcagtggctcacgcctgtaatcccagcactttgggagtccgaggcgggtggatcacttgaggccaggagttcgagaccagccttggtgaaaccccctgtctactaaaagtacaaaattcagcctggtgcggtggtgtgcgcctgtaatcccaacacgagaattgcttgaacccaggaggcggaggttgcaatgagccgagatcgcatcactgcactccagcctgggcgacagagcaagactctgtctcaaaaaaaaaaaaaaaaagaaagaaagaaagaaagaaagaaaaaagaaaatagtaacctgtagtcccagccattcccaaggcttaggtgagaggattgcttgagcctcgagaccagcctgggtaacaacaacgagacaccatctcaaaaaaaaagaaaaaaagaaaagaaagaacaaaaaatcccccaaaagccagaatagagggtaaggggagggtagaaggtggagggaatggaaccacagagttagaatattagtcttggccaggcgcagtggctcacatctataatcccagccctttgggaggctgaggcaggaggatcacttgtacccaggagttcaagaccagcctgggcaacatagtgaatcctgtctttacaaaaaataaattagctgggcatggtggtgtatacctgtggttccagctacttgggaggctgaggtggaaggattgctagagcccaggaggttgaggctgaagtcagccatgatggtatcacttcactactgcctgggcaacagggcaagatcccatctaaaaaaaaattgatgtatattttacatacactaaaatatacacatgcagctcagctcgatgaatttttatgggtatagacccatgtaaccactagatgaaggtaaagaatatttcttagccccagcaggctccttcatgcctcttcgtcttcccaatcactaccgccaagtggtacccactatcctgacttctcagtgctagtttagcctgttctgaaaagtcatacaaatgggatcatgcagtttgtactgctttgtgtctggcttctatggctcagcatgatgtttttgagatggatctgtgtaggggtagtttgctctttttctttgctgtgtggtatggtattccatcatatgaatgtcctgtggattttcttttctttttttctctttctttctttttctttcttttctttctttttctctctgtcctttcttctttcttttctttctctttctctctctttatctccttccttccttccttccctccctccctctctctttccctttctttccctttttttctttcttttcttttttgttttgacagagtcttactctgtcctttagggtggggtgcagtggcatgatcatagctcactgtagcctccaactcctggctcaagctatccttctgcctcagcctcctaagtagctggaactacagacatgtgccaccatgtccagctaatttttaaatttttttgtagagacagggtcttgctttgttttccaggctggtcttgaactcctagcctcaagtgatcctcccaccttggcctcccaaggtgctgaaattacaggcttgagccactgtgcctgtttttttttttgtttgtttttgagacggagtctcactcactctgttgcccaggctggagtgcagtggcgtgatctcagctcactgcaacctccgcctactgggttcaactgattctcttgcttcagcctcccaggtagctgggatttcagatgtgcaccaacacacctggctaatttttgtacttttagtagagacagagtttcaccacattggccaggctggtctcaaactcctgacctcaagtgatccacctgccttggcctcccagagtgctgggattacaggcgccagccaccatgcccagccatgttctgtttcttaatctgggtgctggttacatgggtgtgtgtgtgtgtgtgtgtgaaaattcagtgagctgcttacttatgacttgtgcacatttccatatgtacagtatacttcaagaaaaaaaaatttcatcaaggaatcaaacccaaggaaggaccttagaatctagcaaagagccaaaattgggaagtcctgaggaagccctttgtcccatcctcacttgacagagtgaacaagaagtaaagcagttcccttctggactgggatgaaggtttaggagacagatccccacccgcagccaggacagtgaggggaggaggtgcagatgtgtctgagagccagggcaggcttcctggtggaggtgactgatgccctgaccctgttcctttccccaatccaaacaggctgaatgagaacatgtccgtgtgtgtggcggacttcgggctctccaagaagatctacaatggggactactaccgccagggacgtatcgccaagatgccagtcaagtggattgccattgagagtctagctgaccgtgtctacaccagcaagagcgatgtggtaggtgcactcccgccaagagtggggaaccatgggagggcatggcctgaccatcacacactatgcctgggtggctgtggatgcaagggtcacagggacatgtgggcttccctttgcaggggcttgtccacatgggctgggcatgtcttggggtatggtgggcatctctgaatagtggtgtgtacatgcccaggataaatacaggcccacgtgtgcatggtagcaatgtagacagtttaggttagaagaagctgcagtgattatgcgtgcatgtgcgcacactcatagaatgtggacagccagggtgtgcagagtggcacatgagctcatgtgtccatgaagtgtgtatatgtgtgtgatggtgagcatgtgtatgcatccacaaaagttacttattcatgtgtatacccgtgtcaagtattttttatatatatatatttttctttttttgagatggagtctcgcactgtcacccaggctgcagtgcaatggcatgatctcagctcactgcagactctgcctcccgggttcaagcaattctcctgcctcagtctcccgagtagctgggattacaggcgcccaccaccatgcctagctaatttttgtatttttagtagagacggggtttcactatattggccaggctggtctcaaactcctgacctcaggcagtccgcccacctcagcctcccaaagtgctgggattacaggcatcagccaccgcacccggctaaagtattatgtttctatgaatacttgtgatgctcccagaggatggttgtgaacatgtgtacataagtgtgggtgtacccatgaacctgggtattggtgcgggtgattctgtgcaggagagactgtctaattccctctgcccctcacagtggtccttcggggtgacaatgtgggagattgccacaagaggccaaaccccatatccgggcgtggagaacagcgagatttatgactatctgcgccagggaaatcgcctgaagcagcctgcggactgtctggatggactgtgaggacccttaggtctcccccaacccagaattcattccaaacccctgactacccccagatggccctcacaggtccaggactctctataacccagacagaatccctgagaatgctgagtgacccacttgcccctcaccaatgctctgagtagggccatcactaaccagtggggtgcaaatcagctaaaggcaccctttcctcctttgtctgtgtgggctgaatcagccccctggctccccacccccaagccaggtatccttgggtagtgaataacagcacagtcttacctggcggccctgcctttgggacatgcactcccagagacttctcattccagactcctgagcacaccatgcttccccgacatgctcctcaacacctgagactctctgcaaaacccttcagtttgttttattggccttctccagactcaggtctcctctgagatatttgcaggatccttcagggaatgcttaccaaactttgcaatattggagtatgcggagaaggccgtgacatttagctagcactttgagggtaaagagaggatgactttgggtcaggaggagacagcctggggcgtcagactcctcagtccaccttgggtactccaagagctgagacgagtaaaaataacagctaacattttcatataactgactagaaggcactgttttaggtgcctggcatgtgtcaaatcatttggtccttaccacagccatgtgatgtagataggtatcattatgattcccattctgcagataagaaaacccagtcctacagggagggtaatttatttttatttattgacttgagtctcgctctgtcgcccaggctggagcacaatggctccatctcggctcactgcaacctcccaggttctagcgattctcttgcctcagcctcccaagtagctgggactacaggcgtgtgccaccatgcccagctaattttttttgtatttttagtagagatggggtttcaccaccttagccaggatggtcttgatatcgtgacctcatgatccacccgtcccagcctcccaaagtgctgggattataggcatgagcctccacgcccagtctgggagggtgatttatttgccaaagattgcacagctggtgtgtttgttatctatatccccaaatcaagtagtttaaaacaacaaacgtttattatctcacacaatttctgaaagttggatactgggaacagcttagcagggtgattttggttcaggatctctaatgaagttacaaagatatcactgggggctgcagtcatctgaaggttgggactggaggattgctttcaaggtggcttactcacatggctgtagcaggaggcttcagttcgttgccatgtggacccctttgtggcactgcttgagcttactcacaacatggcaacccaggagaaagtgcgaggaagccacatgccttttatgacctagtctcagaagtcacacacaccatcacttctgccaaatcagaagcaagtcactaagtcctgcccatgctcaagaggagaggatttattctccgtcttttgcagggaggagggtcaaagaatttatggacctattttaaaccagcacagcttgtaagtggcatagccaggctttgatgcaagtctgttctggggagctggaaggtctgttctagcaaaccctcatcagaatactactccatatacagacaggtttcccgagacccttcccagctcctgagtctcccaggacccaactcagaaattcttgggaattcccaaatccccatagatggcctcaaactgctgaggctccctataaccctctaaaatgcccccagtcccctgagtgtcctaaaatgtccccaggcttccagaatgcaccccttctgagtccctgctcaatctcccacccctcattttgctgccctaggtatgccttgatgtcgcggtgctgggagctaaatccccaggaccggccaagttttacagagctgcgggaagatttggagaacacactgaaggccttgcctcctgcccaggagcctgacgaaatcctctatgtcaacatggatgagggtggaggttatcctgaaccccctggagctgcaggaggagctgaccccccaacccagccagaccctaaggattcctgtagctgcctcactgcggctgaggtccatcctgctggacgctatgtcctctgcccttccacaacccctagccccgctcagcctgctgataggggctccccagcagccccagggcaggaggatggtgcctgagacaaccctccacctggtactccctctcaggatccaagctaagcactgccactggggaaaactccaccttcccactttcccaccccacgccttatccccacttgcagccctgtcttcctacctatcccacctccatcccagacaggtccctccccttctctgtgcagtagcatcaccttgaaagcagtagcatcaccatctgtaaaaggaaggggttggattgcaatatctgaagccctcccaggtgttaacattccaagactctagagtccaaggtttaaagagtctagattcaaaggttctaggtttcaaagatgctgtgagtctttggttctaaggacctgaaattccaaagtctctaattctattaaagtgctaaggttctaaggcctactttttttttttttttttttttttttttttttgcgatagagtctcactgtgtcacccaggctggagtgcagtggtgcaatctcgcctcactgcaaccttcacctaccgagttcaagtgattttcctgccttggcctcccaagtagctgggattacaggtgtgtgccaccacacccggctaatttttatatttttagtagagacagggtttcaccatgttggccaggctggtctaaaactcctgacctcaagtgatctgcccacctcagcctcccaaagtgctgagattacaggcatgagccactgcactcaaccttaagacctactgttctaaagctctgacattatgtggttttagattttctggttctaacatttttgataaagcctcaaggttttaggttctaaagttctaagattctgattttaggagctaaggctctatgagtctagatgtttattcttctagagttcagagtccttaaaatgtaagattatagattctaaagattctatagttctagacatggaggttctaaggcctaggattctaaaatgtgatgttctaaggctctgagagtctagattctctggctgtaaggctctagatcataaggcttcaaaatgttatcttctcaagttctaagattctaatgatgatcaattatagtttctgaggctttatgataatagattctcttgtataagatcctagatcctaagggtcgaaagctctagaatctgcaattcaaaagttccaagagtctaaagatggagtttctaaggtccggtgttctaagatgtgatattctaagacttactctaagatcttagattctctgtgtctaagattctagatcagatgctccaagattctagatgattaaataagattctaacggtctgttctgtttcaaggcactctagattccattggtccaagattccggatcctaagcatctaagttataagactctcacactcagttgtgactaactagacaccaaagttctaataatttctaatgttggacacctttaggttctttgctgcattctgcctctctaggaccatggttaagagtccaagaatccacatttctaaaatcttatagttctaggcactgtagttctaagactcaaatgttctaagtttctaagattctaaaggtccacaggtctagactattaggtgcaatttcaaggttctaaccctatactgtagtattctttggggtgcccctctccttcttagctatcattgcttcctcctccccaactgtgggggtgtgcccccttcaagcctgtgcaatgcattagggatgcctcctttcccgcaggggatggacgatctcccacctttcgggccatgttgcccccgtgagccaatccctcaccttctgagtacagagtgtggactctggtgcctccagaggggctcaggtcacataaaactttgtatatcaacgagcttctgtctcctcttgtctccttttagctgtgatgtggccccattccctggcaattcagttcccccatcagaaaaaagaagggcttggtagggtcttggaattctgtcctcattagagagggtagaaatgaacacacagatagacaaaaagacatacaagcaaagagatgcaggttctcagaaacccccagtgaggaactggcatacagatccaggatcacagacacacacacacacacacacacacacctgttccgccgcaaactaacagacacatgaattaatggacacacccaggaggacctggtcacaaatacagagactgaaactcagacgcatagagtaacacagacacacagaattacacagacacaagcatatttacaaacatgctcaggcagatacccgccacgaataggaagagacacagacctagagtcaagtgacacaaatactcaagagacatgtagagtacaacaggtactcacaaccccgaacgttcagactgacatagaaacacaggcacagaacacctccgatcatcacggacccacaaagggcctccagcgaagaccagcccaccgtgtctggcacgcactcgcgagcgggcgttcgcgggtgtggccggcagcaaatggagaaacccttggcagcgcccggacgccctccagtggcggctcctgagaaccggggacagttcaatccgggccacaaacttttttagaacaaatcattgtgggaagctgggaggagagagagagagaggaagtcggacgtgggcgaggggcggggtgtctggactggaacctctgggcccacgtgagtgtctgtcccgctgctgagtgggtgctgtgtgtttgggttgctgtagtgttcgcttgtagtgcaactatcctgtgttatctttattattcgatgccgcctgcctctgcggaccgtagtgggcacatctacactgcagcggggtgccttacccaaagcagatcggaattggggccgggcgcggtggctcacgcctgtaatcccagcactttgggaggccgaggcgggcggatcacttgaggtcaggagttcgagaccagcctggccaacatggtgaaaccccgtctctactaaaaatacaaaaattagtcgggcatggtggcggggacctgtaatcccagctactcggaaggctgaggcaggagaatcgcttgaacacgggaggcggaggttgcggtgagctgagatagaggccctgcactccagccagggtaacaagagcgagactccgtctcaaaaaaaaaaaaaaaaaaaaaagaacaacaaaaaaaagaactggatgcgtctgatctgacgcacgcctgtttgtttacgactgcggggtgtgcctttgtctgagtagagatagtgtgtggcttttgcgggcttaacgtgtggctcaggaggcagtgggagtctgcatcatgtatcccgattgcgtcttactcgagttttgttttgagttagaggcgacaggtggtgcagcgttagacactgggaagctctgtggcttttgtattcctgagcgcgaaggttaatgacggatccgtggggttgagcttgtcggtacagacgccagacagcccgatttacgggaacagccgattagaggattcgggagagcggtcggtgaacttctggatgtctttcgggaggggaaggctctatggtcgcgtgcagagcgcccgttccacgtcaggtacccgaccatagagcaaggcggccgcggactacccaagggaaggggaggccgtgtcctttacaacttgcctcccgttgttagtctagtttctatagccaaaccttcgggactctctcaactcaaaattttgcttttcctaaaggcaactgggttccttccagattacgaactgtgtatccacttaatctctatttcgtatacctcctcctacagcgaaatttgtgaggcagtcctctgaagcacggccaatctggtgaacttttcctaaaatgagccatcgctaccagctttagtgagctaagacaataactgcgattggtgggcagattgttttgaaaccgccctaacggcaaggggcgggctcctggtgaattcatctctttccggtttcttaaaggcaacaggaaggaggggtttctgccgaccctccatttgattggttctagtggttttacccgctcggactcctcaaggggcgggagatgtacaccaatcggaatgtgtgttacagagacacttagtttgatgaaaggactgcgcaggaaaggccgtgggacactcattctgagatcttaccgttgattggaccaaattgttactcccttattttcattggaccttacggcagccggcgcgcgagagttacccaatcagcaagcgctccgcctcctgccttttcccgccctccgctccggcctcggcttcgacgtaggccaacgcttcctccccagtagctcctaggccttctcgtggccgttgttttgaaaacggcgctctgattggctaggtttccgggcccgcgcccgttgccccacgcactgaccaattggcactcatgtaacatcggacgaggcacgagtgaggggggaggcggtggcggcggccattttgagccgctgccgccattggagtgggccccccccctttcccccttcgcctcctgacaggaaaggtttaagggggacagagccctgggaggccgggccgggctcgggggccaccccgggggcccgggccatggatgtgcgccgtctgaaggtgaacgaacttcgcgaggagctgcagcgccgcggcctggacactcgaggcctcaaggccgagcttgctgagcggctgcaggcggcgttggaggccgaggagcctgacgacgagcgggagctcgacgccgacgacgaaccggggcgacccgggcacatcaacgaggaggtcgagaccgaggggggctccgagctggaggggaccgcgcagccaccgccgcccgggctgcagccgcacgcggagcccggcggctactcggggccggacggacattgtgagagtgcgcggggcgggggccggggagcccggagcctgggccgaggaaagggctgtgggacgcgggagtccagcgcctgaggtcggggagacgacctgaggatcgggggatcccgctacccgccgccgaaaaggatctggggaccagggccccagcacgaccggagggtggatcctgacactcggtgcaggggggacactgggggaggggcctctgggtttcggaggtgagggacgggggtggcggggaggattccgtaccgtagggatcggagaccggaaactgctttctggagccgaagagagtcggaagaacaagaggttttccgtttgggttggggagggtctcgaaaatggggatcctagggtacggagctccgtgggcttggcggtcgtgctagcccagcgtgtgggctggggggtggggagccgtgtttccagggtggggaaggaatgtccaggtgtgcggggctgcgagagttctgaggaaggaggatcctggaatatgccgctggatgcgatcctgggcgttctcctatttgggtacgggggtgggtgggagaggtggaggcgctggtgtctgtggctggggagggtcctaatggactcagtgctttggagtttggctagtgagcatttaggggctgcgggagattgaactagggggcacccccatctctcttccggggctggaaggccacccttgaagcaggcacagcctggacattaggtgctgggagatctggggactttctggttggcttctagaagaggtatagggagccctggtgtccagaggctggcgggggagaggatgctttcctggacaaaggatctgggggtctagagctaagaaaactgagggcaaataactcttgaggctgctgctgactggtctggagctaactgtggggtttttggagaacagagggtagctgggggtgggatgggggcagatgagttggtaacattccaagtggatgaaatatgtggcgggagacagaggatcctgtgtccagcacaggagtacgtatctggcttagcgaatatggggaggggggaggccgtagggagcaaagagaaagaaacctgttgacttcactggaggcctcagagtggagtgtggggaatgtttctggacctgagcgtctccaggagaaatctcgacggttcccagaagcagttatttgtgtacccagggagtgggggccctcggggagcagcacggaactcttcatcagccaggagctgtgactctgggaatgggttcgggtagacctgcggttgtctgaggagaggaaaacctgatatgggacggcgtgaatcttcagttagaaaaaaagcagctttcgggccgagtgcagtggctcacgcctgttattccagcactttgggaggccgaggcgggcggatcacgaggtcaggagttcaagaccagtctggccagcatagtgaaaccctgtctctactaaaaatacaaatattaaccggatctggtggtgtgcgcctgtagtcccagctactcgggaggctgaggcaggagaatcgcttgaacttgggagggggaggttgcagtcagccgagattacgccattgcactccagcctgggcaacaaaagtgaaactccgtctcaaaaaagaaaaaagcagctttctttctcttttttttaaatacagatgggggtctcgctatgttgcccagggtggtcttgaactcctgggttcaggtgatctcacctcggcctcctgaagtgctgggattacaggcgtgaatcactgcaccaggcctcagggcagctttctagtaggactgggaaatggggggactggaaaggttaaggagtaagtagaagggattctggcgtaagagtttgtggagtttttctgaaaagagggcaccctgggacttggggctaaggggataaggagagaaatgaggtaacagaagagacaggatttggggttggaattggatacttgttcataagagaatttcccggagggaggagtgtggatttggggtaggcagtggcctagagattatcgaggacccaggtgctggaaagaggacttcccattgcagagacttgtgaagaaaggagtgggcctgtgtgtgtgtctagagcaggagggatcgtggcaggaatgcctagcaagaaagggtagtgggttagtagtgacctggtggtctgggcagagagtcatctctgagaggaaagcgaattaggtgctttggagcgtagactctagactaagacagacttcgtttcaaatctggcttaaagatattggcaagtcacttcacctctgtgggcctggtttccttaatgtgtaaaatggggttaatcaacaaatagtgtgttcacagcccctccaacccctgaggggtgttatgaatgagatcacatgtgaagggcttatcactgggcctgccttttatgagaagagggatgttttagagaatggagaaggaccctagaattatagcttctccaggaggggctgcctctgtgaacacaggagagagatgctggggaaaagaggctttgtgggaagaggagcattgtgcttggagcctggaagcagcagaatagtttgaaagggccccatattccaattaaggagataatgctatttcttcctctctcccttacttgctacaacaaagtcctttgagcccccttcatgcctcccttaagccctccttcaaccttggtaaacagaccggtagcaaaccacatgacctgtgactttcctccctttgggctgcacctggtttgtgcccagatgtatttatcctctgagaaggaatccgatcagttagcaagtggcagaatagtctctccttccctttggttctggctcacggctcctggcatagccactggtagggcccttggggccctaactgagagctagcccctggggaggagagcctgtatgctgcccatcctagctttctaaagttctctctgggtttggctgcaaggttcttgagggaatttctggttttagttccacctctgagctttcacacgtgttatcccaaccccagtaacattctccattctcatcactgagtcattacctatgtatcctttgaatcaaggcttatctgttattttccaggtccctttcttcattcctggtactactttgtagccttcaacacaatcatattaaatttttgtgtgtctttaagatttgtctgtctcactaaactgaaggcttcagtggggcaagcttgtcttcagctgtatcccaggctctggagtatagtatgcatgccatgaatagttaatattattattcttaccactcttagttgagctcctggacctgcagatgccttctggacgctttggtccagggttcttcatgaaccgcccctctaattggccatttttaattttgttttaagatgccatggacaatattaccaggcagaaccaattctacgatacccaagtcatcaaacaagaaaacgagtcaggctacgagaggagaccactggaaatggagcagcagcaggcctatcgtccaggtaggaaaatacacatggttcatctctttggatggaaacaatctacatggagcctttaccccctgcttagagcgggtcttcccagagaaactgtgcatcttttttcttgggcagttcatctaaacattgtcactctggcaagaattgtttaaaggaaagatctcagtcctatttccaagtgttgggagaggggaggttccatggtatctgtaaaaaagtgatgttagtatcagccgggtgtggtggctccctcctgtaatcccagcactttgggaggccgaggcaggtggatcacctgaggtctggagttcgagaccagcctggccaatatggtgaaacccgtctctactaaaaatacaaaaattagccaggcatggtggcaggcacctgtaatcccagctacttgggaggctgaggcaggagaatcacttgaacccaggaggcggaggttgcagtgagccgagatcgcgtcattgcacttcactcagtctgggcaacaagagtgaaactgcatctcaaaaaaaaaaagatgttagtataagcaccctggagagttgagacccctagactaatacttgaatcttatttagaatcttagaatgggggagccagaaagagccttctaagtctaatctggtatttctcatgttctgaagattattgtttcaggggatattattaggggattctcagaaaagggttccttagccaaatgtgtctggaaactgtagcatgtgctatatcgtctcttggaaattcactgtgcttgttagaacattaaaggctctgagaagtccagaatttaaaaaaaaaaaaagaaagtgtgtgtcaggcctcaggccaggtgcgctggctcatacctataattccaacactttgggaggccaaggtagtaggatcatttgagaccaggagttccagaccagactgggcaacatagtgagaccccttctctacaaaaaatttaaaaattagccaggcatggctatgactgactacatgcacacacctatagttaaagctactcaggagacaaaggtaggaggatcacttgagcccaggagtttgaggctgctgtgagctatgattacactactacactccagcctgggtgacagtgcaagaccctgtcacgaaaaaaaaaaaaaaaaaaaaaacctaaaattaaaagtaggttagaacacagtggctcatgcttgtaatcctagcgctttaggaggccaagtcaggaggatcacttgagcctaggaatccaagactagcctggcaacatagtgagacccctgttgtctttagaaaaaattaaaaattgcctgagcatggtgacatgcttgtagtcccagctactcagaagactgagtcaggaggatcacttgagcccaggagttcaaggctgcagtaagctatgatcgtgcacggcactgcagcctgggcgacaggaagaccttgccttaaaaataaaaacaggccgagtgcgatggctgttacatgcctgtaatcccaacactttgggaggctgaggtgggaggattgcttgagtccaggagttcaagaccagcctgggcaacataaccctgtctctataaaaaataaaaatattacctgagcatggttgcacaatcctatagccccagctactctttttttttttttgagacgaagtctcgctcttgttccccaggctggagggcgatggcgcgatctcagctcactgcaacctccgcctctcgggttcaagcgattctcctgcctcagcctcccaagtagctgagatttcaggcgcctgccaccacacctggctaatttttgtattttcagtagtgacggggttttaccatgttggccaggctggtctcaaactcttgacctcaggtgatccgcccgcctcagcctcccaaagttctggggttacaggcgtgagccactgaacccggccaagtcccacctactctggaccctgaggtgggaggatcacttgagctaggaagttgaggctccatgagccgtgatggcagcactgcattccagcctgggcaacagtaagcctctgtctccaaaaaaattttttttttaattaaatttaaaaaccttgtgtcttcttgggctggtgttgctgaaaatattttttttaataaaaaaatagacaaaaaaccttgtgttgtatcgtttaaacttaggatttcccaatcatgttaagtatatgtctttacagaacaaagttccccatgatgccaactctcccttcccttttttttttttttttttttgagatggagtctcgctctgttgcccaggctggagtacaatggtgtgatcttggctcactgcaacctctgcctcccaggttcaagtgattctcctgcctcagcctcctaagtagttgggactacgggcgtgccaccacacccagctaattttttgtgtgtttttagtagatgtggggtttcaccatgttggccaggatggtctcaatctcctgacctcatgatctgcctgcctcggcctcccagagtgctgggattacaggtgtaagccactgcgcctggcctctcctccccattttatagattgaggagttggcttgtccgatggcagagctggggctacaacctagcatacttgctcccaggctagtcctcttggttaataagcagcattccttatcatttgtgccttactatttggaaagcagggtcccactattgagaactgatggagcccggactgacccccagttttgtgctgcttttactgtgttgtggcctcccagtgccttttcttagtgtatctggttgattttgtctaacgccattctggttcatccacaaagttaaatccccagacatttcttgtgggtggctcagaactttactgaatgtaggttaaaccgcagatttgtgtcaggctctgtgagacttgtaggatcattcagccacaggagaatattttctgtgccgttatccacagacattcatcaggagccctgtgtgagcccaacctattgctgggaaccagggaagctctcttcaggatggctgagcaccatcccagccctagagaaccaggagacttttctgagagatgtggtccacatgccgaagctggggagtgatccaaaatggtctggggttgaatgcagaaatgagtagatgtgaatgagcttcagcatcagggattaatgctgtgggagaaatgaaggtagcctacatctgtggtttgctcttggttaggcactgattcctggagtctgcctgagactaggacttacccgtggtccacagcacggtatcccatcctgactttctgttaatggtatgacttaaagaggttattgcacctatgggatggcttaaccggagtgattctggcctcttttggtagggtaactaaagcccgtagagttagctgcaggaccacagtaccctgttgaattcatcctctccccctcccttgccagactgaagaagctttgtaagaactaaggcagagaggttctttgggaagagaaattggagaatttagggtcatggtatctcagatcctaaccctgttctccagtatggccttcttggctggctcagcaggcttctgttgaactcagcaagctgcctgtgcccagcccttcatcactgtagtgaggatcctgctcacatctctcaagggaaaagggaccagaaaagtgatagctggggagcttgcgagtgtcttgaccatctgaatttgtcttgacaatagaaatgaagacagagatgaagcaaggagcacccaccagcttcctcccgcctgaagcttctcaactcaagccagacaggcagcaattccagagtcgaaagaggccttatgaagaaaaccggggacgggggtactttgagcaccgagaggataggaggtgggtgtatgaggcagcagtcacccttgctctggtaggtttctatatccatagcctcgtgcttgctggggacatttgcactaacctagaggggctgagtaaagattccctctgctttcacactcttcctgtcccttcccgtacttgctaccagattcagctttcctaaacttttggtccttcccccagttcctcccttcttacctgcagggtaacttctaaatatcttagactttcacgcgtgagatgccagcctgcctgttctgtcctttgccttactgcccctgcagtcagctgcttgatacccgtaatgaaagaaatatctgtttcctaacactactcccaaatacacatcctcttcccattcatccactcattcagtcagttctcacagtgctgtcacgaagtgcccactcttgggctggacactagcaacatacagatggacagtgggttttgccttctgttgttccagtgtggggactcagacacatacactagtaagccacaacctctgaggtgagtagtcaggatgcaggtgagtttcaggagttcagaagagggagcagcctctgctttggtcatttcccttccctaacaagcccttccctcctttccctccagaccaagtccttcccttccctccttccttccttcagttcctgtctgaagccttttgcaattatgaaaactaggaatggccactgtactcatctggactagtcatctgacattctatttcctatctggcggagtccaccttctaactagcttgttactgtctgagacagggcctggatctcacaggctatgatttaagttaggacatggatcccacctcatatggggttcttccactgcctcccacagagcagaagcctggaagctacttactgatggagagcaaaggaagaacactcgctctgatcctgggctggcagggaaagtttcctagaatggacttaacatgtgatgagcacagctcatccatgttagccctggcctggcgaggccagaggggccctccaccagagggaagcctgctgctgggagagtcagcagccaaatgggcatgggctccccatctgtgcatgcagtgcactgcgaccacccagactgtccaggcaggaccctgagtgttagattctacctttctacccttcttcctcgttcctgtacagcagaaaccaacagtgttaagtcccttttttagcgttttggtaggaaaatgaatatcgtttataatttaggacactgaaaaaaatgggtcatctcaaattcttacagatgtaggattttaagaagcctggtacatggatagatagtaattattgggatttatataggctcttgcacattccccttcctggccagcacccttttgggataccacagcctccaaacagtaacagagatcagtgtggaagtggttgtcaacatgcagagggtatggatcagaatctttgggtgtaaaaaaagagtgaaaaaattccctaaatgattctgatgccccccttcagcagagcatgccttcttcaatccctgtctccaccgtaggagttgacggtcattgctctccttgcaaggatgtagggtttcagagttcttttgcccacctctgtggaaggaaatggagattcaggaagcagtctggaggccactcatagattacagcagaacattcattttctttcctttgtgctcatccattgttcttgtatgacttaacccctgtttctaatacaggggccgctctcctcagcctcctgctgaagaggatgaagatgactttgatgatacccttgttgctattgacacctgtaagtctttggagtgtgcatctaattctgccttacagtcagtatggggaaattgtggtcttgaccttcaccagaatccctgctgggcaccgtccaaagacattgttagtccacatgtgagacacggcttagctctggagcaagagtactggtttggaggcaaaagacctactcccaactctagcagtgggaccctgggcaagtcattctacttctctgagcttcccttcaggaaggagtaaatctgctgtactaacctcagaggattttcagggagactcctcagtggatataggagcaatctggaaaaccctgaaccgccctgtacacacaggggttgtcatctaatcaggaagggaatctgagtgcagctggggaaacttaactctttgacaaccagttcccgtttccatcagctgctcaagttcctggtgaaaccaatgccactgtgtcctgtgaggcactaacctggcccgccctgctgtctgtcctccagttcagttttctttccactggataagtggctttcaccttcactgtgcatctgagcatttggaggaattattataaaggtcctttcgctcagacctcctagtcaagagtctaagtggtcgagcctatgaatctaaatttttacatgcacccagaagcccaatcaggtctgagaacactgcacttctcaacagagcagaagataagcagcaatttattcatctatttctacagaagcttctgtttataaagcactggctacatgctttagtaagagataaaaatatacacaatctctaatatcacaagctctcgaaaacaacatctacccagagtagaggtaaacattgtttaaaaagtgttgggtggcagtggttcatgaggcagcgtctagatgaaatgcaaatgtacagatcatgacggtcagcctttagagaaaggagagcgcctcatgggagggatggtcaggaaaggctttcttggaggcgtgactggctccttgaatattgagaatattgagaagggtaagagcaacagtaggagagtcctaggcccatgaaaggaattaggagcctatggggcacctgggcattggttcctgggtggcaggtgtggatcagggtcagatccctgtatagctattggaaacagaagtccggttcccaaattgatagaattaccacagagggcggtaggaatatatggtggtggtgattaacctttttgtattctaaaaactagtttgagcctgggtaacatggcgaaaccctgtctacgaaaaatataaaaatcaccctggcatggtggcatatccctgtagtcccagctgttcaggaggctgcggtgggaggatggcttaagcgcaggagaacagaagttgcagtgagccgagatcatgcctccgtactccagcctgggtgacaaagcgagaccttgtctcaaaaaaaaaaattaatttgaaactgctgaggatatggaccctatccctagcaaatacacatccccaccaaagacatgtgttgacaatttctgaggatacccctgaagccccatccttggatcccaccagataaagaaccccagttcctctctgaggtcatacaggccaatttgcaatactgcacatcctccctactcaaagggagagaggttgaggggtgtgctggttccttttgaaactgcccccatgatgtgttcactgtgtactcctggtcagcacttggggaagttccctctgcctgcttctttcttaggacttctaaaacatcagccaggccgggcgtggtggctcacgcctgtaatcccagcagtttgggaggccgaggcaggtggatcacctgaggtcgggagttcgagaccagcctggccaacatggagaaaccctatctctactaaaaaatacaaaattagtcaggtgtggtggtgcatgcctgtaatcccagctactcaggaagctgaggcaagagaatcacttgaacccgggaggcggaggttgcggtgagccaagatcgcaccattgcactccagcctgggcaaaaagagtgaaactccgtctcaagaaaacaaaacaaaataaaaacatcagccaactgtgggcattttccttcacagataactgcgacctccacttcaaggtggcccgagatcggagtagtggctatccgctcacaattgagggctttgcatacctgtggtcaggagcccgtgccagctatggggtcagaaggggccgtgtatgcttcgagatgaaggtgagtaggagcaagagaaggggaagggacagagaagtccatccattgtaatatcctgataccagccaccttggtcagagctgcaactgcaaaagagattggattgtgcaataccatgtccaagcagacaaaactgtgatgaactcaagacaactacatcattgctaaatatcatatcagaaaagcaggccaaccatgcattgcttcatcaagcagatatttccttggtgagatttgacccaggtattatgtagtcaaccagtgtagtgatgacatgtttgtagaactgagaaaagaagttgtttggaagaaaagtgatctagaaagaatagactcagatgtcacttattaaagggaggccagagggagaacagggcaaagaactgccagcttaggccagcctctgctgtcatctctccacagttccatgtcaagttatgtttatgaaaataatagatgctcatgtttaacaaaagttcagacagcacagaaaagtacaggataaaacaggttattctcgccaggtgtggtggcttttgcctgtaatcccagcacttttgggaggccaaggcaggtggatcacaaggtcaggagttcaataccaaactggccaagatggtgaaaccctgtctactaaaaatacaaaaaaattagccgggcatggtggcgggtgcctgcaatcctagctattcaggaggctgaggcagagaattgcttgaacccaagaggcagaggttgcagtgagccgagatcacgccactgcactccagcctgggtgacagagtgagactctgtctcaaaaaaaaaaaaacaaaaacaaaaacaaaaaaaacaaaacaggttattctcatgtcctctcagttcccatcctaccatcctactccctggagggaacttctgtgttaacaatttcttacctgtggtttgtgtatccaaacttactgatgatagctaataagtatagagctctttgcatgcacaagatacagcaccaagctctttacatggattatctccattaatcctcacagtaccatctggaaacaggtactgttagccccagtttttagaggtagaagctgaaacacagagggttatattttattgaccacgacaccattgatgtaagttgtgcattattttatgtacctctcatagagaaacactgcaacaaaataaactacgcagtgttttctttttttgtttgtttgtttttttgtttttgagatggagtttcactcttgttgtccaggctggagtgcagtggcgcgatctcggctcactgcaacctctgcctcccgggttcaagcaattatcctgcctcagcctccccagtagctgggattacaggcatgtgccaccctgcccggctaatttttgtatttttagtagagatggggtttctccatgttgatcaggctgggcttgaactcctgagctcaggtgatctgcctgccttggcctcccaaagtgctgggattacaggcgtgagctgccgcacccagcatacgcagtgctttctcatcacatttattgtaaaatggatcctgatttcagagattttaaaatgtgtgtctgaaaagccagtgaggccacaggtagatacggatattcggcagtctagtcttttaatacgaaattaagtcagaaggctttttttttttttttaacttaatactgtatcttggacatttttccatagcagtacattagcccaatgtactgctttgctccttgttttttgtttgtttgattgtttgttttgtttgttttgttttgttgacggagtttcacttgttacccaagctagaatacagtggcgcaatctctgcttactgcaacgtctccctcctgggttcaagcgattctcctgcctcagcctcccaagtagctgggattacaggtgcatgacgccacgcatgcctaattttttgtatttttagtagagacggggtttcatgatgttggccaggctggtctcgaactcctgacctcaggtgatccacccaccttggcctcccaaagtgctgggattacaggcttgagccaccgtgcccggcctactttgctctttttaactgttgcatcatattttgtggcatggatataccataatcagtgctttattgatattttttctgatgttaaaatatatatatatatatatatgtgcacatatatacatccaatgctgcacagaatgttgcatatacaaatacagtcacacatacgtagacatacttgtccacatattagtgtatctataggatgctgagttatagagcatgtgcatttatggggttttgttgtttttttcttttaatgtttttgtaaagatggggtcttgctatgttggccaggctggttcctaactcctggcctcaagccatcctcctgccttggcctcccaaagtgttgggattacaggtgtgagtcaccatccccagccatttacagttttgatagagacttctagattgccctctaaagacactgtaacagtttatctttctactagatgttacaagagtctcttaaactaaaacataaccgtattttgaaatgcctgtctctgtggccctgtactctactgatccctttggaggccctggcttcgattcggttcaacaggcttttcagagctgcttaaacgcttcttctccagcaagaaaagccattgctattttttaatgcctgatatgcttccctcctatattggctcataacctacggcctccagagaagcaaccctgagcccttttgtcctctttcctcagatcaatgaggaaatctccgtgaagcaccttccgtctacagagcctgacccccacgtggtccgtatcggctggtccctggactcctgcagcacccagctaggtaaggaggggtcagctatgcagtccagagaatagagtgactgtccctacccttggattttcaaggctcctaagcttccttttccagcgtcagacttagaatagaactaggctgaagtggaacaggtacaaggattaggtatatgccactgtctctgtcatgctgtattcaactgagaggactatggtcatgaaacaactgttctgtgaagaatcaattcttatccttcatcttttaggagagggtccaaaattctctttaggaatctattccctttctgtaaaaaggatcagtgtctcctgcccttaaaccaagctgctgataagttcccaagctccattaagttctgtctgtattttctgtccggagcctaacctagaggaaaaaggggagcagagaccagtgaggccagggctagttgggagaggggcaggggctgcctattgaaaggttttgaattttgcgggtccccaggcttcaatgaccttctggtcccaagtgactgattattctgaccaatgctgacacctcctgccttccgtttatgatcatacaaacgttccaattatgaaaataatatgtgttgcgtataagaattcaggccatacagaaagggaaaaatgaaaatccttcctaaacctgtgagagaaactaaccaatgttaacattccatttgtagtcttctggacatttatttttttgtacatctttaaactggatcacactaggactactttgtatagccttgttttaatgtatgatgggcatatttttgtaaataactgcagctttttgactactgcataattttccattttatagttgcattatttaacaagtccccttctgtagctcatttaaacttattgcaaatttttgctgttttaacacttgagccattatcctggtccataattgcctgaccacttaagactaatctttaaaaatagatgatattctcactcacaagtgtttgtttaaaaaatatgttcacatggacttagagagtggaataatagataatggagactcagaagtgttagggggtaacaaggtggaggaggatgagaaattggttaatgggtacgatgtacattttttaggtgatgaacaccctaaaagcttgaccactatgcaatctgtgcatgtaacagaattgcacatgtaccccataaattggtacctcctcaaaaaggtagatatgttagcaccaaaaaaaaaaagtatacagttttcatttccatatgtgttagcactttttatttaagactcataagtcatctcatcttatctctgtctccgttttgagatgtaggtggtggcagttgatagggatggggaaacagcccaggaggtcaagcaccatatccagggtcacatagctggtttgtagcagaacgagccctggcattcatgcttgtcggcccctgcttttctaacagcatactctttgggttctgcccggaatctctaactcaggtgtcagccagagcccttgggatctctcagtcatatcacttcagcacccagttctgtagcctgaggaaatctagtacctttcccaggggtcagtcctcatggtctccaggagcaaaatccagccccttcactgatttctaccacaagtagactggactgaatattgggtgtcacaaggaagggttgcatctcagcatacagccattctcctccatcccaactcctgtcttccttcctccctttcttttcaaattctcccctctgtgcagagttattcagttgagctcctactcccagactggacaatgaaacccatcaagccctccaagttctacatcattaagggcttcctttcacccttccccacccctattttaaaaaggcatctgattaataaaactagtaaagaaaatgatttttttcttcaaaaataaaagtatgtggcagccattgaggctgttatgaccatcgcaggtttaacctgcctttgcctatttcttccgtcaggcgaagagcctttctcctatggctatggaggcactgggaagaagtccaccaatagccggtttgaaaactacggagacaagtttgcagagaacgatgtgattggctgctttgcggtgagtgctagcagcctgtgggagttggcagaaccagatgttgggctacagacttctttttcaggatacctctatccattgtctgccccatatccagccactctcgccatacttctttgtctctgcttgacagactggaatgtttactgtcattttgtgggaaattctgtcattccatctcctctggtcttgtgtgcaaagttttcagatgacaccctgaagaggtttggggacttcaggtgtgcatagccttcctccgttcctaggtaccagagtaacattttctaaacaaacctaggaatttcttatctttcattgctaggaaatagcctgtctgctcctgaaggcagtggtattggctcttgccccatgttggcatcatcttatcccaaaacttctccctttcttcatctcacattggttgagccaggcttcctacaatgcactgccttctggaagagtagagatgatgcaaaacagaacagctgttgctgccatacttcagtctttgagaacagtgaccagcagtcaccttgctgtgcagtatggctgtcagctctgggctggactccctggacccagttatgttcttccattcaagccctgggcaatttacccttcttgtttttcagttccctctaaatgagaatctttgcacctacctcagaattttgtgtggagtcattaagttaatccattaaaagcacttataataatgcctgacacacagtaagtgctcagtaaataccacttaatactgttaacattaggagttataagagatgtttgtaaaatgtgccgtaaggccccagaggaagtgaccacctggatggattcatcctctgaagcttattcttttgccttccttcatatttgtacacatgtactcttccttcttcttttttatttatttatttatttttgagatgagttttttgctcttgttgcccaggctggagagcaatggtgcgatctcggctcaccacaatctccgcctcctgggttcaagcgattctcctgcctcagccccctgagtagctgggattgcaggcatgcaccactacacccaactaattttgtatttttagtagagacggggtttctccatgttggtcaggctggtctcgaactcccgacctcagatgatctgctcgcctcggcctcgcaaagtgctgggattacaggtgtgaaccaccacgcccggccccttcttctttttttaactttgagataaattcaaactcggaaaagcttgagaataaagaattctcacagggccttatccagattctaacatttgccacatttgctttaccattttcatgtttatggtgtacatacacatagagagttaactcttcaacaatgtgtttgaattgcactggttcacttatgtgcatatttttttctttttttctttttttttttttttgagacggagtctcgctctgtcgcccaggctggagtgcagtggcgggatctcggctcactgcaagctccgcctcccgggttcacgccattctcctgcctcagcctcccaagtagctgggactacaggcgcccgccactacgcccggctaattttttgtattttttttttagtagagacggggtttcaccgttttagccgggatggtctcgatctcctgacctcgtgatccgcccgcctcggcctcccaaagtgctgggattacaggcgtgagccaccgcgcccggccatttttttcaataaatatattggaaacttctttggagatttgcaacaatttgaaacaacagacatagcctagaaatatcggtaagattaagaaaaagttaagcatgtcatgaatgcataaaatataagtaggtactagtctgtttcatcatttactagcataaaatatccacaaatctattacaaaaagttaaaacttatcaaaacttgtgcacacagactctacatggtaccattcacagttgagagaaatgtaaacaaacagtacagtattaaatcataactgtttttattttatttttttgaagacagattattttctctgtcacccaggctggagtctcgtggcgcgatctcaactcactgcaacctccgcctccggggttcaagtgattcttgtgcctcagccacccgaatagctgggattacaggtgtgcaccaccacgcctggctaattattgttttttgtttgttttgttttgagacggagtcttactttgttgcctaggctggagcacggtggcgcaatctcggctcactgcaacctccgcttcctgggttcaagtgattctcctgcctcagcctcctgagtagctgggattacaggtgcacgccaccatgcctggctaatttttgtatttttagtagagttggggtttcgccgtgttggctaggctggtcttgaactcctgaccttaggtgatccacctgcctcggcctcccaaagtgctgggattaccaagtgtgagccactgcacctggcctaatttttgtatttttagtagagatggggtttcaccgtgttggccaagctggtcttgaactcctaacttcaagtgatctgcccacctcggcctgcgaaagtcctgggattacaggtgtgagccaccaagcccagccaactgcataaaattaaccagcgcatactgtaataattttgaagccacctcctattgctattatggtgagctcaattgttgcaagtttctacttaaaacactgtgtgtcatacatcttcacgtgagcagttcttttcggtaaattgtgtatcacagtaaaaagtgatctcgcaattcttgtgtattttttaatcatgttactgcaatatcataagccttgagtagcaccatgggatccatacgaagttccactagtgatgctggaagtgttgctcagaagcagaaaaaagttatggtattacaagaaaaatttgaattggttgatatgcactatagattgaggtctgcagctgtagttgcctgccatttcaagattaatccagcataaggaccactgtaaacgaaaaaaagaaaaaattcccgaagccatcactactgctgtgctagcaggtgctaaatccctgcactttttatcatatattgacaatgcaaggccggacactgtgactcacacttgtagtctcagcactttgggaggccaaggtgggcagatcgcttgagcccaggagttcaagaccagcttgggcatcatggtgaaaacaaacttttaatattttataaacataaaaattaactgggttggtgatgcacgcctgtagtcccagataggaggctgaggatcgcttgagcccaggaggctgcagtgggttatgattggcccactgcactccagcctggatgacagaatgagactctgtctcaaaataaataaataaaactgcagcttttgtgtaggtacagagttgctataagaaaggcatacctgccgggcacggtggctcacgcctgtaatcccagcactttgggcggccaaggagggcagatcacgaggtcaggagatcaagaccatcctggctaacacagtgaaaccccgtctctactaaaaatacaaaaattagccgggcgtggtggccagcgcctgtagtcccagctactcgggaggctgaggcaggagaatggcgtgaccctgggaggcggagcttgcagtgagccacgattgcgccactgtactcccgcctgggtaacagagcaagactctgtctcaaaaaaaaaaaaaaaaaagggcatacctataggctataattcaagaaaaagtgaagtcattatatatgacaacataaagcaaaagaaaggggaaagatctaaagctgctgaatttaatgccagcaaaggatggtttaataactttagaaagaggtttggcttaaaaattctttacaggaaaggcagcttctgccaacgaagaggcaacaaacaagttcccaggcatcattaaggtataattgaagagaagggatatctgcctgaacagatttttaatgccaagtgcagtggtatgatctcagctcactgcagcccccgcctccccggttcaagctattctacctcagcgacccaagtacctgggattacatacttgcgccaccacacctagctaataatttgtattttttgtagagatggggtttcgccaaactcctgagctcaagcaatccgccctccttgacctcccaaagttctgggattataggccggagacaccatgcccagcaaattctgtcagattgatgatcaggactgttacttataaagctggtaactctcaaaccctaaatcctcaacaccagttgccagtcatttggttgtacaacaagaaggtgtggatgatgaaaatcctttttctagattggttccattgatgctttgtttctgaagttaggaaatacctttccaatatgtggttcccttttaaaattattttgatattggagaatgccaccaagaaccccatgagtttagtacagaaggggtcaaagtggtttatttgtccctaaacaatgggctgacccttgaactttgcagggattaggggcaccaacccccatgcggtcaaaaatccacgtatagtttttgactcccaaaaacttaactactggctgagcgcagtggctcacgcctgtaatcccagcacttcgggaggccaagctgggtggatcacttgagcccagaagttcaagaccagcctgggcaacataaggaaaccctgtctttaccaaaaatagaaataaaaattagctgggcctggtggcacacgcctgtggtcccagctactcaggagactgaggtgagaaaaaaaaaaaattaatagcctactgataacataaacagtcaattaacacataggctagtgtctacaatttttatgcactcatatgacatacctaacttttccttattttttttttcagtatttctagtcatagggatctgagagttttttcaaattgttgcaagtgtccacaaatattttcagtatattgaatgaaaaaagtacacatgtaagtggacctgcccagcttgaagccagtgttgctaaaggtcagctgtgttttcatctgacccatttgagaggaggttgcatacatcatgtcttcattactttggtctgtattccttcttttctttttttttaataaatgagacagggtcttgctgcattttcacaggcggtgatccctcttctgatcagcatgagagttttgacttgctttgtttcctaccttggctagttcacccctccttaggcaacctgatggtccctaactcccaggaggtcaccatatcaatgccgaacttagtgtggacagccgattggcatagtgcactacagcccagaactgggctcaagccatccaccccaacctagtagctgagactgcaggtgcacggcactgtgccaggctcggtgtgtactctttttttttttttttttttttttttttgagagaagtctcactcttgtcccccaggtttgagtgcaatggctttatctcggctcactgcaacctccgcctccccgggttcaaacgattttcctgcctctgcctcccaagtagctgggattaaggcgcctgccaccatgcctggctcatttttgtattttttagtagagacggggtttcaccatgttggccaggctggtctcgaactcctgacctcagatgatccgcccgcctcagcctcccaaagtgctgggattatagatgtgagccaccgcgcccagtcggtgtgtaccctttttgagacggagtcttgttctgtcgcccaggctggagtgcagtggcgtgatctcggctcactgcaagttctgcctcccaggttcaagtgatttttttgcctcagcctctcaagtagctgggatcacaggtgcacaccacgacatctagctaatttttgtatttttagtagagacagggtttcaccatgttggtcaggctagcctcaaactcctgacttcgtgatccgcccacctcggcctcccagagtgctaggattacaggtgtgagccaccacaactggctgattcttaagagtaaagatattaatgacagtaaagttattaaatttaaaacttgatataatgctattatctactgcgcattcaaattttgtcacttgtcccaacaatattctttcgtccagttgagtttctagttcaggatctgatctggcctgggatcatattgcattctcttgccatgtgtctttagtttcctttagcctgaaacagtttctcagcctttttttgcatttcaggatctcagtatctttttgtttttgtttttgagacagagtttcgctctgtcacccaatctggagtgcagtggcgcaatctcagctcaccacaacctccacctcccaggttcaaacgattctccagcctcagccgcccgagtagctgggactacaggtacgcgccaccacacctggctaatttttgtatttttagtagagtcggggtttcaccatgttggccaggctagtctcgaactcctgacctcaggtgatccacctgcctcagcctcccaaagtgctgggattacaggtgtcagccactgcgcccggccctcaatatgttttcaataaaacatttttaaaatgaaaactgtgttcatactctacaaattgttcggttttaaaccttgcatttttttcccattgaagagtaaatcttggccatctttccctgtccacacagacaatatatagatctagctcagttaaagttgtttcttaatagttaatcattgtgaattgattttttcaagaatagggtttccaaaaaaaaatcgaggaatgtaaaaggggatacagtgtaaagtcttctttagacaccccccctcccgccccacccatttttcacatataccctccccagcatgtgaacccactggtactcggggtttcatctttttttttttttttttaacttgtatgtcttgggggtctttttatttatttaatttttttgagacagagttttgctcttgttgcccaggctggagtgcaatggcatgatcttggctcaccacaacctccgcctcccagattcaagtgattcttctgcctcagcctcccaagtgctgggattacaggcatgcgccagcatgcccggctaattttgtagttttagtagagacagggtttcaccatgttggtcaggctggtctcgaactcccgacctcaggtgatctgccctccttggcctcccaaagtgctgagattacaagcgtgagccaccatgcccggccttggtggggatctttttatggtactaccaagagagcttctttgtacttttatattgtctgtagtcattgtatgactgtaccataattgatttaacctagcgcctccctttggtggacatgtcgttacttttgcagctttgtatttagtgactgtaatggctgtctagtattctgatgcaggggtttgggtaccctgctttaatttagcccgtcttcctgttagtggctgtgaaagttgtttcctggaacagataaatgcggcttgtcttttttccatttactggagtaacttggagatctttttgtagccccacatatggatctcctgtgcaatttagccactcctacttccccattggagcacattttccgtgctggcatgagcattttgcacatagaattttgcattcttgtgggaatgtagttgtattccttcttgaaagttagattctaagtcaaaggtatatttttaaattttcatagctaccaccaagactacactccaaacaggttgcagtaatttaacttgtcactgtgtgacagtgtttgccaaagtctgttctttcagagtatgaggttcttttggtatgtggcagtatggaactctaggccttgactcttgcttcaaccagaacatctctgcatccagtcttaagattccttatatagttttctttgttcagaagataccacaactttaaaaaggctcagggtgaggagttggtgggggtgtaaaaatcattggtctcctggaacaagaggggaggacattggtgtcaaatatcaagtcctcaatttgcaaaacaaaaaggtaaaacagccttccaagtggagaacagaataacccatttcagcaaaccataaagagtatgatacttagagcctagggacaacagaaagaggtgtgagacaccaggctataaaaatggcaggctctgaattatgccaggcttcaggagtttgggtctttaggcctgggactgacacaggagtgtttcagcaggaacaacaacacaactccacttgccttttggacagatggctctgttggtggtagatgggttggttgagggcgccggtttctgtgcattatgggaagttcctatagtgaagctggtggccataaggaaggctaactaacaccaacagtcatacctgctctccatggtcttttttttttttttttttttgagaaggagtcttgctgttgcccggctggagtgctgtgacatgatctcggctcactgcaacctccaactccctagttcaagtgattctcctgcctcagcctcctgagtagctgggattacaggcactcgccaccatgaccagctaatttttgtatgtttagtagagacggagtttcaccatgttggccaagatggtcttgatctcttgacctcatgatctgcccacctcggcctcccaaaatgctgggattacaggcgtgaaccaccacatccagccgctctccatggtcttgacgtgggtgcatgcttagagatgaacaggcatgagggcctctgacacagagctgtgccctgtgagcactgaggaggttaatgaggaagctcctcaagggagggtgcttctgtcgcttcttgaagggcaattcccaaggtggtcacctgaatagagaaagaaattatactttcatatcagaaagcgaaccgtgtattttgcttcagtctgctatctaatctcaagttttgagccttttcttctctgagatgggcatttagaaaaatatttaacaaacgttttaaaaatataaattttaaaaaggcaaaaaaacactaagaaaaaaaagagcctctcgtatcctgcagccaaagcaatgtttccaaaacacagttttgagcaggctgctcctctattcaaaataagtcagacactctgctctgccaccagcatcaagttcaaattcctgcggtaaattagagtccctcacatgccgaggtaggccgtgtcccctcccaccacttcagtcccagccccttatttctagcacagtgcctgacattttgcagtgatagctcacattccttgtgtgctcactgtgtattaaatgtactagcccatttaacagttagaataaacataggctgtataaaatattattaccccgcccccctttttttgataaagaaacaagatgaaataacttaaccaaggccacaagttagtaaatggtagaactgaagccatccaccttctaaaatgggatcataggctaggcgtagtggctcacacctgtaatcccagcactttgggaggctgaggcgggtggatcacctgaggtcaggagttcgagaccagcctgaccaacatggagaaaccccgtctactaaaaatacaaaattagccgggcgtggtggcacatgcctgtaatcccagctaattgaggcaggagaatcgcttgaacccaggaggcggaggttgtggtgggccgagattgcgccattgcactccagcctgggcaacaagagtgaaattccgtctcaacaaaaagaggggggatcttaattactaactttagcaattcaataagtagttgttacagaataaatgaatgtggtccctgcatggctcttcagctgttcctgaattacttccccctcatcttttatgcctcagccaatctgaccttatgttctgtcactgctaggcttatatacaagcaactgagaaacctcagaaacttgcttctaggtaggtcatcttactgaattatgatagagtgtccttgtctcattccccactggtcgctaagctctgtcggtcccagattatgcagacatgtgtatcagaaagagtacgaactcagggaacatgttgaacaagctgaactcagttcgaaaaggccctgcggtggctttccttcatctgttatattcatagactgccctttctgggtttcttttgtttgtttttgtagagatggggtctctttctgttacccaggctgtacttgaactcctggcctcaagcatcctcctgccttggctgctcaaagtgatgggattataggcgtgagccactgcacctgtctcctcatcagttttcaggacaggactggaccaccttttccttcgtcttcatctcagtctaggcacaagactcaaatacttggagcttcttaaaattacctgctttaggacaggtgcagtggctcaagcctataattccaacagtttggcaggccaaggtgggaagatcacttgagtccaggatttcaagaccagcctgggcaacataacaagaccctgtctctacaaaaaaatttaaaaattagccaggtgtggaacatgcctgtagtcccagctactcaggaggctgaggtgggaggattgcttgaacctggaagtttgaggttgcggtgagccctagctgtgccactgcactcagcctgggggacagggtgagaccctgtctcaaaaaaaaaaaaaacaaaaaaaaaaaactcttgcttacttgcttcatatccaccaactttggggtcttaggcaaggaggactttgggctggacattctctgagatgttcactgatgctgcccagcttacctgtatgttggggaaggatgcacttcaatctggaaagctgtccacattctactccctgcatctactgtcctcacatttgactcccagtgcctatggcaagagttggcaatcatattcctttggctttttctcctaggattttgaatgtggaaatgacgtggaactgtcttttaccaagaatggaaagtggatgggcattgctttccgaatccagaaggaagccttggggggtcaggccctctatcctcatgtcctggtgaagaattgcgcagtggagttcaacttcggacagagagcagagccctactgttctgtcctcccggggtttaccttcatccagcaccttccccttagtgagcgtatccggggcaccgttggaccaaagagcaaggcagaatgtgaggtgagtggggccagaatgtattggtggccaccttgctgccaagacagaggagacacacacacacacacacacacagacttgctgcgagagtagccttggggcaagtggccactttgtcccagctcctcagggttggactcagagctgaaaagctgctctgagtgtgaggtgaggggtgttggtgtgacctaagttgaagtcggagaggctacctaaatctcagaaagattcatcttcttcttgagtgaggccagaataggggaaaaggaggcttttcttacagcagaaaaggacactaggcgcttcttggggagtgcactgtgccaccaagtgttctttttttttctttagagacagggtctcgctctgtcacccaggctggagtgcagtggtgcgatcacggcttactgcagccttgaccttccaggctcaagtgatcctcccacctcagcttctcgagtagctgggaccacaggtacatgccaccatgccaggctaacttttttagccactgagcctggcccaccgagtgttcttgaaggaggttgagtaagttccacctctcacccagagctatcaaaagataaatggcctttgggaagatttgattccaagagctatactagtgtcttttttcttaaaacaatatttttcttgtatgtgtaagttatttatgcttgttctagaaaattaagaagtaaaaaatttaaattttcataatgccatcatctacaaataagtttacttgcagagttttggagttcatctgttctttttaatgtctaagtgcctgttttatgctcacaaacatttatcattgagattctatggtataagcattatgataccctgctcttttcacttcacattattttgtgagctttatcccatcacataaaaacctctctttgaacatcattttttcttttttaaaaatccttcaagggaatgaacgtcattcttaatggccttacaaactcgccactcccccctagtcgggcatttaagatgcatctgtgtttaccaaattctaaatgtactgattagatacaattcacgtccttgtgtgtgcagctctgttcctatttcatacttaaagaaagttgtaccacttctacccactccatggggccagtcccagtacacagccttccctgggctattgcagggggcggggaatgggtcacataatcctgtaaatgggctgggtttggtggcaaatgcctataattccagcactttgggaggccaagaagggaggaggatcccttgagtataggagtttgagaccagtctgggcaacataaggagactctcatttctaccaaaaaaagagagaaaaagattagctgggtgtgatggtttgtatctgtagttctagctactctggaggctgatgtagaaggattgcttgagcctgggagttcaaggctgcagtgagctgtaattgggccattacacgccagcctgggcaatagagtgagaccctgtctcaaaaaaacaaaatactataaatgctaatgatgacagcacttggttttttgtttttgttttcccccgaaagtcctgggattataggcgtgagctaccgtgcctggccagcacttgacttaatgctcaccctgtcccaggcactgtgctcagagtctgacaagcctgatctttttgaatcccgataccagtactgtgaggtagatggtattactgcttccgctttgtagaggcagccacagctcagaggtccagagtcacactcacagtcaccaccgagccaagtggtgccataccaccatgccgcaacaccttccctgtcttgttcttgtagattctgatgatggtgggcctgcctgctgctggcaagaccacatgggccatcaaacatgcagcctccaacccttccaagaagtacaacatcctgggtaccaatgccatcatggataagatgcgggtaaggccagccactggactctccttactcacctccaacctactgagtgctgccctgcaactaaaatcactcacccctcaccaattcctgcccgcaggtgatgggcctacgccggcagcggaactatgctggccgctgggatgtcctgatccagcaggccacccagtgcctcaaccgcctcatccagattgctgcccgcaagaaacgcaactatatcctagatcaggtacttaatgatgaccattgtgtcctcaggagaagggaggggaccccttgcatgcctgagaatctccctctggtccctttcttttttcccccgtaatgatgatggactgctgtgctagtcgggggggtcagaccttgtcatacatgatgacatggtactacacacagctgagcctggactgggatcatgatctaggcctacttactcagactcatcagcagccccaaagaacatcaggtaagaactgtttagcaaaatggaaggagtatggatttccaagcctgagagactggagcttgaatgccagctcggctactccctagctctgtgcctttgggcagctgactttattctctgaatctccatctcttggtttgtaaaacagggatctcaataccatctgcacccctaacgcaggacctggcacttagtagctggtgattattgttaaatactctacagaataggtagagtagctttcatgccaacagcagtgctgtaaggtaaatgctattattgcttccgtcattttctcttcacaaatacgtatgactggcaggtacatacctaagtcatattttctacctacacttcagttaatggtggagttcttaacatcagggaccttggaacctttgtatttgaacataaatattgtatgcagctgcaggtgtatcctttttatgaaaaagaagggaaaaaaaaacagttttttgtccctatctttcagcattctcaaaaggatgagtgacccaaaaatcattacagattcctgtctcagagtaatgagttccacatggttattgcctatgcaacgtcattgcctattgacatttgtcctgaaggctttcacaagtaacaaagggtgtctccttattttctatgtttggggatctgtgaatgagcctctgttcccttcagccttgcatttgtgctttcttaagaacctgtgagtgagcaaatatgtaaactaagtaacaccctgcccttgtagccttcctgaagtgccttccatacgtgtaggcctggatacttggtgaccatgagttcaaagggctcctgataagagtggaggtggggacagcgtttggctttgtcagaatggtagtttgcttgttagaaaggaatcgccagagaccgagttgccttcacataggaatgaggttcctacacaaaacagttgagcacaggatagtctaaaagccatccgtggttatccccccagctcatattgtgtacaatcagtgttctctccgctttgaagatttgtcttttaaacccttggcctcactttacctgatcctccttgtcggggcattcaagaatttttttagtctgtattgaccccagttggactcattgtcgtgaaagggagagcagtaataccattttaacactctgaggatacatacctcttttggataccctagccagtattcctccctgtctttttcttggtttgctggttaaatcagctgtgaaactcatttcaaatatgtggcctaggggagaatgattatagtctagagtggatcgtctaacatctctgtccaggatgctgaagtgggttttctctggaagccaggcccatgacagctttgcactctgaagacctactgtcagccttcttggctgctgctggcttgttcagggacagggtctagggctgtaccaggtatgcctgtggtcttcagggctaccagcctcctgcttaagggacatgtgggtcaggccaagagatcttggccaacaatgagacagagaacctaaactctgaaggctggggaggagggttctctggttaaccacagattggaggattgcctcggggcctgaagccataggctactcaggctgagggagggattgtaaagccagtggtttcacctgttttggcctaaaccccaaaagtgggttccagaaaactctgggtatgagaaagagggagggggaagttgtgtgtttgtgtatagagggttcagagcaggcccctggccaatcctggcacttccattccaccagctttggcggtgacaggtaagttgatgatgcatagctgtctcctgggctaggtggaatttccaaaggggaaacccatactacaggcaaaatccctgcagttcctggatctcagcccagaaccatcttttgcctttactggtttttcctgagtggtcagatctccccagatttggctcttccagcctcctgttatgtaggttggccttagaaatgctcatccttgagagggaaggagaggttgtctgcagaagccaggtgggcctttgtaagccaggattctgtgtttgtctggccaggactctaactcctaccctgggatgtatgtgattgggcacaaactctcaggtatatcggggctttgacctacattctgtgataacctgagtagccttttgagatgatgtgggcatcacagctgtggaacatcagaagaggaaaaagaggtagaccagagaggaagctgaagcctctgcagaggactataggactgctaagtcacgcactcagtgtactgatagatcacagctctgctgacttcccaaacagccatagtctagaatggttggggccatggtgggaatttggggaagctttctggaggtggaatgtctgagtcggggcacagaggatgattaaaagagttggggctttgtcctgaggagagtggggagtcatggttaggttttcatccggaggaatgtggataaatttgcctggctagtaaaaggctgcagaggagagagaaaggtggagtagaaggccacattgcttcaggtgtctctttggggtcctctgttggaggtgggaagcctctggaatgagatgctttctggccttgtcccagagggcctcaaaatggagtacagaacaggaactgactggcctgctgtgaggcaaacaagttgcctttctggaggcttctggggagcctccgcagggccatgttgcccaagcccaccccagagtagggcactgttgcctgggagttccgttagagggctctaacagctagagccaggccaggcatcagttagaatcagggctggatgggttgacgtcacagtcagaacatgtcgttctagtcctcatttgcatcctggtcagcaggtgccacactttcgcctgaaacagaaacccagggctagaatagtctcccaccgtaacctgtgtcttatttgcaggccttggaggaaggatgtttctttccttcatccccagccagccatccctagagcctgaagcccattccattcttgacacaccagccagttctcttcctataaatgtggttcttttgactggaattcacctcactctgagcccaaagtaaatctttcctcatcagccttcactttgctcctcagatctagctaggtttctcctgctgccagtatgaccctggtgagctgtgacaagtgagagtagacagggacagtggggcttgagagatcctgggctgtcacatcatcattcgtacctgctgtgttccctcctccctccctcagactgttatacaccaaaactccccatatagcttctctgagaaacccaactcttgtcccttagtccatgtcacagggttcagggaacacagacagccacattttctcttggaatcaacatcttcaagcagggtgggactgggagaagcagaagctaggcagagggaaccaaagcagctggaaaagctgacctagctgttgtgctggtctcatagcaacagctgccagcagcccccagcgaccacagaagtgctgggctggcccaggggctgtgacctcactgtgtttgctgtggcaacagccaccagcagctaattccctttcctccaggaaagccaagtatttgcatttctgctggtgtggtttagatactcttcttcccttccccaaacgaaggagtaagtggagggaggtgcagtcttaaaaaccactgctgagttgattctcagcacctcaattccaaagtgcctgagaagccatctctgagtctacccacttccaaggacaaaggccagctatttataagtccaatctgctccacctccattcctctcatcccatgaagctgcaggggctagccgtcttggcagcattgcttctcttctctgtcccctcatcaggacattgacagggcagttgtaccacatggaagacctccaggactgtcactccatgccctcgcagttcagaggaatcaaagtaggatcacttaggggcaaaaaaaaaaaaaatgcagaatggtctggggccatattcaccctggcacctacctactctgagcttttgtgtcagaagaaaattatatttagctgaggaagccaaactctttcttcctatgaccagatgccacgttctgctttgcttttaggaatggagtcaaagaagagtagtggggagaggggacttaacttttcctctgtaacatgatgttccttttcaaaccatttgtggcccaagtgctctttgtgggccggtgtccaagaccccaagaacagtatgtgtgtgcctgtcacccacatgactgcccacatcctccttcgtgagggtagggacactttccctgggggacagggaagaacattttttcctggcgcgtgtttcagggccagaggatctggttagtttaagcaactgcacccacggccccagaacttccagcagatttgtgctggagtccttggcccctggctaatccacatccagcaccctgttcctatgtcttagaagacgatctcttgaaaccttgttttttcctcaagcttcaattttccttggtattttccattgggaagcctctcctggatagtcagtcctgtaggtcttattttcagatccactctgggtgttgacttttcactgcccactcctttggcactagccagagatttttacatctgcaaatgctctccagagccaggacgagggtgatgatccttgtctttcagacgaggaaatttgagactcaggctacttggggacttgtctgagtctcacaaatagtaaagggcacagcggggatttcaagcccaagtttcttccccaaagcctgtgttcattccaccctgtctcactgttcctgcttttctgcttgggaggtcactataagcttaaccttttctttggtctgagttgcttcaagtcaacatgacagtataaatatctacccagtgatgaccacatcaatggcagctcacagttgttgagtgttggctatgagccagggcctgggcttagacgagggcttttactcacgtggactcattcagtcctcacagcaaccctaagacatccatgccgttttcccttttcagggcttgattttacagaggagcaggctgaggctgggccatcccagtgcactgcccgcttcctgtcaaggtgtcttctgccctggaggccacctgtgtccccctacttgagtagtttcttgcactttgtcaattgctttatggacattctcttactcagtccttgccagcccagggagggaggcttttcaaccccgtattacagatgaggcaactataaggactggccaaggtatgttagtagccacaccaggacttgaccctagactctttgcacccaagcaggccacatcttcagaatacatttttttttttttggtccatttgtatatacccctttacagactgttttccccatctgtggcttctttcttgggtccctattagagccactaaaaaattgtttaaatgcagttaaaaactccttactccgtttctgctgagttcctgagtttccatagggagggtacctgtataggtgcctgggtcttacttctagaggttcaggctcaggaagtctcaaatgaagtttgagctgctcactttttaagtagtgtcctcgtgattcaagtatacaggctgagtctatggaaccctgaatccaacagaggtaggccccattcccaaagggcccgacatgaaggaggtgttcggtaaatggaagccgatgttgttactgctctcaaccacatatgtgctagagcaccgctctgccagcaccagcccaggacacacctgccatcacttagaggaagggaaggaaacattaggagcaaaactgcacttgcgaaaagcagagtctcctgatgtgtagagcttgctggttagaagcttgtgggtgaggctgatgtttcagagaaggactgagggaataaaagaaccaatgttaataagaacaaactacaaaactgtccaaaggagctggttaattagtagcatagctaatctataggtattacacagccattaaaaaagaatactgcacagaaaaacttcagagaaagtttcacgttacatgaaaaagcctcaggaggatgtgcataatacaattctttttgtgtaaaaaaatcacatagatatttctaaaagtgcacggaagaaattcattcttcattctctctgggaagtagggctggcactaagggaacacaggggtttttcctctaaactttatgccttatactgtgaatttttttaccaagagtatgtattagcttttagaatagggaaaagaaattgtaaggtccagtaccaagaacaaataggattaaaaagcaaagtcccaaccattaggaatcctttgccctgtgcctgtctgcagccacttacctaagtcaattcatttgctgagggtgactcaagaatcttctaagtaaagaagagctgtttcctgagtttctctgcttacaaggagcactgatatccttttctcagtccctggcctacataatacccctcagaggaaaaaaccaactcttaatgtaccatctcttgcctcttctgttaccttacccttagacaaatgtttatgggtcagcccagagacgaaaaatgagaccatttgaaggcttccagcgcaaagctattgtaatttgtcccactgacgaggacctaaaagaccgaacaataaagcgaaccgacgaggaagggaaggatgtcccagatcatgcggtcttagaaatgaaaggtaggaaatgagtgcttcccagaggaacgtcaatgcagggtcctggagagaagaagctctttactcagtttgtccttccctggctccccagtgatttcttttttgatcttactctttctttgcttctgctttgtcccttccttgtctaccacagctgtgaatggaaaagctacccatctgtcttatgttggggttttcaggctggatggggctggggcagcacaagggaaaggatgtatgggagctaaagctgaaagtcctgtgtgctcaccctgcctctggtcccagatgggctgactgtgggcaggcctcagtttgtttctctgtaaatatagggatggtgatgccatctgtctgacccattccctggggtgaggcctgagggagctgtgcactgtgtctaggtgggtcttagccacctcttcagaaaacggaggagtctttgttagcccctgacacttagcaggctgaggggttggggctttgtctacctctttctctctctctctgtttttttttttttttttttttggagagggagtcttgccctgtcacccaggctggagtatagtggtgcgatcttggctcaccgcaacctccgcctcctgagttcacccagttctcctgcctcagcctcccgagtagctgggactacaggtgtccaccaccatgcctggctaatttttgtatttttagtagagatggggttttgccatgttggccaggctggtcttgaactcctgacctcaggtgatccacccgcctcggcctcccaaagtgctgggattacaggcgtgagccaccgcgcccgcccttctgtctatgtctttcttattcactattccagttttcttcaccttctcccttctggaaggccactcttctgggtggaggggaccagacttcagaaggtactgacctcttcttcttgttctctttggggcacttccttcctcctagccaacttcacgttgccagatgttggggacttcctggatgaggttctgttcattgagctgcagcgggaggaagcggacaagctagtgaggcagtacaacgaggaaggccgcaaggctgggccaccccctgaaaagcgctttgacaaccgaggtggtggtggcttccggggccgcgggggtggtggtggcttccagcgctatgaaaaccgaggaccccctggaggcaaccgtggcggcttccagaaccgagggggaggcagcggtggaggaggcaactaccgaggaggtgagacatctcacacacagcactctccactttctgttcccaggttggggctgggctttgactgcttattcaatcagcaactgaagttttctgagctccagctgtgagttatactctggtagaaaacttgaaacaagtcagacacggagacctcagaaacgctcccactttcccactccctggacgctggttatgaagccctttgcccatttgcatatcacagtgcacattctgtcacattgctgtcatttttgtgaaccttcccccatctgaccatgagctccttggaaataggatctagatcaaaatctattggaaatgggggctacatctttggccaggtctgaagaggactagatgtgactcgttcatggctgtcaccagtgcttagcttcctctcatttttttttttttttttttttgagacggagttttgctcttgttgcccaggctagagtgcaatggtgtaatctcggctcactgcaacctctgcctcccggcattcaagcgattctctcgcctcagtctcctgagtagctgggattgtaggcaagcaccaccacgcccggctaattttgtatttttagtagagatggggtttctccatgttggtcaggctggtcttgaactcctgacctcacgtgatccacccgccttagcctcccagagtgctaggattacagatgtgagccaccgcaccctgccagcttcctctccttgagcatctccttcctgcatattcaacagctattgagatgctgggacacagaaacccaggactgccttggtctctgcctcaccattcttgcagtccagtgaatgagacaaacctgtcataagggctgggacaggggagtatgcccgggggtctagagaatcccagaggacatgctttgttgttcaccttgagttcttgctctgcgcctggccatgccggctcacagtagtcaccaagacaacccagttccctggggttgccatttgggaatgatggcgcctttcatctggatttctccaacacaggtttcaaccgcagcggaggtggtggctatagccagaaccgctggggtaacaacaaccgggataacaacaactccaacaacagaggcagctacaaccgggctccccagcaacagccgccaccacagcagcctccgccaccacagccaccaccccagcagccaccgccaccacccagctacagccctgctcggaaccccccaggggccagcacctacaataagaacagcaacatccctggctcaagcgccaataccagcacccccaccgtcagcagctacagccctccacaggtgagagaatgagtgtgtgtttgtatgtagtgatcgcacgtgtgcttttgaacctgagcaagttaggtggaggcggatctggggaaatcaacacatgccccagctactggtcttcactctaacctctagcctgcccttctttctccctggccgtgatcttgactcagatggaccctacacattcccagatcccctccaaacccaggagtaaatgtagaccttcccagaacctgctcttctcccaccaccctcaaggggatgggctgtaagcactgatccctccagcaagtacattattcttggctagtgtcactaacctcactaaatccccaagaaagcacttgactggagtcaccccttgcccaggctggctgacctctttgtcttttggacataataaccagggcactaaggttgctgaggacttgccctctgcacagagagcttcaatcctgagcagctccaggctcagttcccgttcttggaaagccagtgccctggctctggtatgcacaggctcctgtaaaccagagaggttttcagttatcgcacagccatttcccaagcactttcctcatgccgggcctggaatcagctgccaggaaaccaatggatggttcccaggcccagctaactagaatatttcttagaacaagagttgggcaggcacagatccaaacccccagccccacaacatcctgtttctgtgagcttggacaaatagcttcccgtctctgggcctcattttcctcataaaggtgttagtagaagtcccttccaaggtttgttgtgaggaatgggtggcactatagctctgggactaggcagacctggggtcaagtcctttttccttggcccagaaatttcatcttgagcctcagtttctttctctttaaaatggggctagtgggacctacccctaggttctatatggagattaaatgatgtaatgatccaacctgtacttgggaagcacttagtcaattgccactactgtttctcagcagatcttccagtaacaactaccaccacctgttgagtacccagtggtttatacacacaagcttattggatacccagggcaagctaaaggagttgttcttgttctattgtgattctcattttataaaaaagaaaactgagatttcaagaagtgccgtgtaccttgctccctgggggtctcagagctggggttagagtccacatcacagccctggggcttgcccttcatcctgccctaccatggcatggagctggctctcctccttctcagcccacaaacaatgtccactaggcaagggaagggcccctgtgggccaaccacttaaaaaggccctttttccatcccagcatttcacatctgcagatttcctctatttcacagagctttggcttttttccctccactttccagccgagttacagccagccaccctacaaccagggaggttacagccagggctacacagccccaccgcctccacctccaccaccacctgcctacaactatgggagctacggcggttacaacccggccccctataccccaccgccaccccccaccgcacagacctaccctcagcccagctataaccagtatcagcaggtaggtgccagactgggggccaactggatggagagacttccatgggcccctcctgggtgtgtattcccagacttaagtccctgcttatccctaaaaagacagcctgctggcctcggcctggcgttcatctggtgcagccattccatttggtcaacacttctgcactggttgctaggtaattggtatcctagccccctccacagtctagcaagtgaaggggaagggctggcctaagtaccaggggcctcagagtcctctttcagcaccatagacagggggctccaaatcctgctgcaggttggtgcccaggcccccatacctgttactaaatcttttgactatgatatctagctatacccaaaaggcactgggttgacaagctgagacctgggcttcagtccctaactgcctacctgtgtggtgtcaggtctttccaaggtgccttgatttctctgtcaggggacctgtgttcaactgttgtcactgcagctgtctctgccctaggtgagggtggggctggtggggaggctaaatgtgtggtggatgcaggacaacttggtgttcttggtttctttccccagtatgcccagcagtggaaccagtactatcagaaccagggccagtggccgccatactacgggaactacgactacgggagctactccgggaacacacagggtggcacaagtacacagtagccagtgtgacccagaggctcccggaggcccctgccggcttcctccaccagcgcctgcctcggcccctcctctgcccccgccagatcccgtggtgctggggatggggtcatcccagggctgcctccctccagcccactgcctcccctctgaggggcttccttcccctccatagggccaggcatttttttctggattcaaacaggcaacaatgaccttttattttctgtttgtccccacctccccagccttccacctcctgttcttcctaccttcttcctttttgactaaataatccccacctcccttgatcatacagtgaggctacagtgactgaggggagaatcccctcctgttcactctcccaaccctgctccagcccctcagcttcccagaccctcatgcagttggttgtaaattctcccaggagctgttttactgtctacttttcaggattaaaaaaaaaatcaaaacttaaaaaaaaaaaagtttaaaaagcaaaatggggagggggaggaagcagtgacttttttttggtaattatgcgcttttttttaatttttagaatttgtctttttactgtgggtgggctgttgatatttcatcaagataagcatttctttcctgagttcaggtgactgaggaagagccacaaaacaaaacacaacaaaaccaaaccacagaatcatctttaacccaactttttatacgatgccccagttccccataactttgcacacaagcttctgtgttcagttgaattgtaactgctttttgtatttggagagagtgactattgaacttgaaaccttttattccgggcgtcttggtagtttctggtgggattcagtgggtgagagggaagaaggggaggttggggggctccttcccttcagaacttgaagtttctcccactgcctcctctccagtggtctcccaggtgccagacccaaaagcttttcctacagtgataccctttatttttacttccccttgactcatatgttttaacatgattttaacaaactgcacttattaagaaatgtgtttgccctgttttgtttggtttcgttttgttttctttgaataaatgacatggcacctcctagcaggaaggaagcagggttgaaaccctgaagtgttactgcagttggccgttaattggggtgggggcctctttaaagggaaattatttactcattcattaaacaacttaactgagggattcatgtgcctggccccgattttggtgctaaaaatgcacgcttaaacaagggtccctggtttaaaatccactagttcatttttaaagtgcttctcttgttctctacctctcacagtctaaaatccctccaggagtttttgagtaaaggacatggaacaggcctctaggtggagggatgggtgggactgatggggcagagaccagggctggtttgtttggcatcatcactgggcatccacagaccacctgcctcaggcctggcctgtgtgcagcacggaggacagttcctgcctgttctgtgtttggggctcatggggattccaggagcttcatgtttcagccagtgtgtgtgagccacctgctgtgttcttcagctgtcctggacagtgctggggacatagtatggccacggcagtcctggaccccgttctcacagagctcccactccagagagaacaaagacctgccagcaccaagtggtcagctgtgagagcctggggtggtgtgcagggagggcttcctggaggagtgagccagggtaaaagactccagattgcatccccatggcccatcttccccttccttagcaaccttatgtcttcgttccctcatacatgctgtgttcctggctccttgtgagagacaatgctgggccacaggagaagccaattcagccccaatcttccctggtgggagctcagagccttgtgaaggggagatgggcaacaaaaacaagggagggaaactgactagtctcagaatctcgggtagggcatcagaacgtgagaaggaaccaaggttggtggctaaaagggaccctagaatgcgccagagaggaggtggcagggcctttagtctggaaagtccccttcccttcatgtccatatgctgggctacagcgccctctgctggcctctcctggtaatgcctaggaatctgggttggtaaatagggacctccttggctttcttccacaactccagacctcaagggaatgcaaatggggaagctcttcctctgttctcagccagtttttctcacacgtctcatctccagtcccttgatgcccactcccttcagaataaaggaggtcaagccacttactatggcttatgaggccctgcatggcctagcacctggtaacatcgctggcgccctctctttctgctccccctttgaatatcaaatcagtgtttattttgttctgaggagccataagtcctttttggaacccacaaatgatgccatgaaccactgcattggagaatacagaggtacatggaattttgcataaaaattcatgaggttctcaaaacctccacagcccaatcatggctttcaagttagagctcctttcctatgccctgaccgtagtgaagtgcttgcagcaaccagaaccgtccgtacgtgccatcctcctcaagactcttccctaccttcctcttaacccagctcctactcgttcttcaggtcttagcttgagggtaccctcccagaaagaaggcttccttgaccctccagcctggggtggacagctccctcagccctctggatccatcaaagccctggccactgagtgacatgtctgtctactctgctggtaacacctaaatagagccccacccatcccatagggaaataaggaccagagttgtcttgtttcacacctgtagatttcctccaggtcctgggaacacaaaatgggaagttctatctcactatccatctcatgccagccagagacagggtatgatgacggaagtaagccaggctggtggctcacgcgcgtaatcccagcattttgagaggctgaagcgggaggattgcttgaggccaggagttggggactagcctgggcaacaaagtgggacccctggctctacaaaaaaattttaaaaattagccgggcgcggttgtgcgcgcctgtagtcccaagtactccaaaggctgaggcaggaggatcacttgagcacaggaatgtgaggttacttgaactgtgatcgcgccactgcattcgtctgggcgacaaagcgagaccctgtctcaaaaaaaaaaaaaaaaaaaaaaagagtcaaggcttagtaatattcctgaattcctgaaggagttaagaaaggaaaaggacaagcgggggtctaaacgagagcacgaaccctcagcgtatgacggctccaggctccgggggaaagtcctttagccatccatcccaaaattaagcacgctgggagctggagtcacagcagtgataaaacgaacaatgattctggttcctactgactgacaggagaggtttaagggtctctcactctccggggagcccctttccttcctggctgcggagggcggagcccgagagaggcacgcatgcgcaatgcaacgtctgccttaggcccggaacttcggtgcctgggcgcagcggtgcacccggacccggaacattctcaggcgaaagtgtctcttgcgtgcgtgggccggaggttagtgtgcggggcccgccgggcggttgaaaagtccgagagaatcaggatggaggccgtggcgacggcgacggcggcgaaggaacccgataagggtgagatcttggtcacgcgcaggcggcgggtgggtgcggttgcggtgtctctaggaaatgattcccccaggaacgcgaagtaggactcgttttagggggacacccacccccctcagctttaccggtcctcttcactactttgcccagattattccctcccttgtcgcgggctgaccttcttttcctccattccttccccccgaaattaacctcttcccagttccagaccaatcctttccatgtccctaattcatttccttaccaggctaactctcaaattaacagaaacctctctaccccggcctaattcctgcattgcctcagaccagcccttctcaaattacctccttccctgtaccaagctgagccttcccttgctctctagacgaatcctcctacctttccaggctaaacttctacctgcctcatgcaaacttatcccaatctaacgattccttcatttcattgtaactcccgtttcccccaaagtccgaaatccagccaggctcctttcaaagtccttactcaatttctgtgctttcccacaaccttcaaagtaatccgacgtcgggtgaggtgtgattggaagcgtggctccaacaccactggccaagaattggtaattgtggaagccagatggagatgattggtatatggaggtagggggagaattgtcgttgtactttctacttttgtgtatgtttgaaattttctaaaaataaaaaatttaacctaaaaaaagtcttaaggccgggtgcagtggctcccgcttgtaatcccaacactttgggaggccaaggcaggagagttgcttgagcccaagagtttgagaccagcctgggcaagagagagaaacctgatctctataaacatttaaaaattagccaggcctggtggctagggagtagctaggacaagctactcaggagactaaggtgggagtgtcactcgaatcctttgagattgcagtgacctaagattattacaccactgcactccagcctctgcagcagagtgagacttgagcccaggagtttgagaccagcactggcaacatagccagaccccatctctacaaaaaatttaaaaattaaggccgggcccggtggcttacacctgtaatcgcagcactttggaaggcggaggcaggaagatcacctcaggtcaggagttggagaccagcctagccaacatagcgaaaccccatctctactaaaaatacaaatattagccaggcgtcgtggtatgtgcctgtaatcccagctactcgggaggctgaggcaccaactggaatcacttgaacccgggaggcggaggttgcagtgagcagagatcgcaccactgtactccagtctgggtaacagagcaaaactctgtctcaaaaaaaaaaaaattagccaggtttgatggtgcattcctgtggtcccggctactcaggagtctgaggcgggaggatcacttgagcccaggaggtcaaagctgcagtgagctgtgtttgcactattgcattgcagtctgagcaacagagcaagaccctgtttcaaaaaaaagaaaaaaaatttgtctcttggccccatctgtctccttcagagagtcatgtatacttggtcttcatttcctcgtctcctgctcacgactgtctgacttttctcctaagaaactgctctgattagggtctgcactgacttcccccatgttgttcaattcagtccccccattcaggtttttgtttgtttgtttgttttttgagagagtctcactctgttgcccaggctggagtgcagtggcatgatctcagctcactgcaacctccacctcccaggttcaagtgattcccgtgcctcagcctcccaagtagctgggatcacaggtgcccgccactatgcctgtctaattttgtatatttttagtagagatggggtttcaccatgttggccaggctggcctcgaacttctgacctcaagagatcctcctgcctcagcctcccatagtgctgggattacaggtgtgagccaccacacttggcccattcaggttttttttcttactagactggactagaattaaatgctgttgatccttccatcctttttgcatgttttcctttggcttcagcgacaccacagtgcctgatttcctgcctgtctctcaggctgctccttctcagcctgactttgtttcccaggggtgctgtaacaaagtactacaaactgcatggcttcaaacaacagaactttattctctcatagttctcaaggccagaaggctgaagtcagtgttgctgaactgaaatccaggtgtctgcagggtcgtgcttccccacaggctctgggagaaaacccatttcttgcctcttccagccagtggtggtttctggaattccttggcatgtggctacatcactccaatctctgcttccccttttgacgttgccttctttttttttaagacggagtctcgctctgttgaccaggctggagtacgtgatctcggttcactgcaacctctgcctccggagttcaaacaattctcctacctcagcctcctgagtacctgggactacaggagtgcgccaccacacctggctaattttttgtatttttggtagagcgccatgttggccaagctggtcttgagctcctgacctgaagtgattctctcaccttggcctcccaaagtgctgggattacaggggtgagccattgcaaccggcctctttttttttaagataacagtaatgggctccagggattacgatgtagctatcttttgcacagccagtttttagcttcagaggcatgtcctccccgcatctgtgcagtgctttttcctggaccctcttgtcatccctctcccactcccctgtgccctccccagtccctacctctcatttctcttggctttggttcttgtcttgattctgatgacacccacagctctgtctccagcccaacatttctctcctgaggagtctggaggcccgtgtagcagcagtcggaccattcccctggatgcctcccttacttccagcacgtcagccctgtggctcctccactcagcctcctgacatctttctgattcgctcactcatgatcctgttccttcctccacagcccctgcccttgtccagctcagtcttcagctgcatcagtgatttaaatcctccctgatacacacaacacatgtatgtcacctgtgacttctttcctccccaacccagccacgctgcttaaagttgtctctatattctgttttcacgtatttcctgcttgccgcaggcttgctccctccactcttgggaaacaagtctcaccaaggtttgcccagcgctccgctttcctgttttctttccatttttttgagacagagtcttcactctgtcacccaggctggagtgcaatggctgatctcggctcactgcaacctctgcctcatgggttcaagcgattcttgtgcctctgcttcctgagtagcagggattacaggtgcccaccaccatgcccagctgatttttgtatttttaatagagagagggtttcaccatgttggccaggctggtcttgaatttgtggcctcaagtgatctgcccacctcggcctcccaaagtgctggattacaggcatgagccatggtgcccagccagctttcctgttttctttgcccatattattgttgatcctgactgtctcccacatcagactgggtgctccctgagggcaggagctggactggattcatcctatggatcctcagcattgcctgacttagggcctctcagagatttagtgtttttttttctttttttttttttagagttttgctcttgttgcccagactggagtgcaatggcacgatcttggctcaccgcaacctctgcctcccaggttcaagctattctcctgcctcagcctcccgagtagctgggattacaggcatgtgccacaatggctgattttgtatttttagtagagacggggtttctcccagttggtcaggctggtcttgaaatcccgacctcaggtgatccacctgccacagcctcccaaagtgctgggattacaggcgcaagccaccgcgcccggcctaagatttagagttattaaagagtggttgggtgaacgcatgaatgcatgagagagtgaatgaatgagtaaacaaattagcaaatgtattaacgatttaaagaattgagtggatcaataagtcaggcctcagggcctttgcagtagttgttgcctctgcctggaattctcttttccaagagacctcatggcttaatccctcaccacctgaggtctctaatcaaatgtcacttttttggcaaagccttctctgagccttccatttaaaattgcagccttggccaggcatggtggtttacactgtaatctcagcactttggaagcctgaggcaggaggatcacttgaggccaggagttcaagaccagcctgggcaacacagcaagaccctgtctctaccaaaaaaaattaaaattaggccgggtccagtggtgcacgcctgtaattccagcactttggaagatcgaggtgggaggattgcctgagctcaagagattgagaccaccctgggcaacctagtgagaccttgtctttactgaaacttttttttttttttttaatttaaagattggcagggtgcaggccaggcgcagtggctcacgcctgtaatcccagcactttgggaggccgaggcgggtggatcacgaggtcaggagttcgagaccagcacagccaagatggtgaaaccctgtctgtactaaaaatacaaaaattagccgggcatggtggcaggtacctgtaatcccagctgctcgggaggctgaggcagagaattgcttgaacctgaggcggaggttgcagtgaatcaagattgctccactgcactccagcctgggcgaaagagcgagactccgtctcaaaaaaaaaaaaaaaaaaaaaaagattggcagggtgcagtggcacacacctgtaatcccagcactttgggaggccgaaggggagtggatcacctgaggtcaggagttggagaccagcctagccaacatagcgaaaccctgtctctactaaaaatacaaaaattaaccaggcatttggcttgtacctgtaatcccagctagttgggaggctgaggcaccaaccacaataacttgaacccaggaggcggcagttgcagtgggcagatctcacgccattgcactccagcctgggcaacaagagcaaaactccatctcaaaaaaaaaaaagaaaaaaaaatttaaagattaactgagtatggttgtgcatgcctgtagtcctggctgctcaggaggctgaggtgggaggattgcttgagcccaggagttcagggttacagtgaaccatggttgtgccattgcactccagcctggcaatggagcaaggccttatctcttaaaaaataaaaataaaaataggccagtcacagtggcttacacctttaatgcccagcactttgggaggccaaggcaggaggattgctggagccctggagttcgagaccagcctgagtaacatgtcaataccctgtctctacaaaaaatttaaaaattacacaggcatggtggtatatgcctgtggtcctagctacacgggaggctgagatgggaggatcgctcaagcccaggcggtcaaggctgcagtgagctgtgattgcgccctgcactccagcctgggtgaccgagcaagaccctgtctcgaaaataaaataaaattgcagcctcctccacctcttccctcctccttccctgtttatttttccgcataactccaggaaacacctaacacattatgttttcggtaattatgttgctaattgtttgtgtcccctactgaaatgtcaacttttgctcactgtggtttctctagtgcccagaacagtgcccagaatatagtcagtgcccagtaaatgtgagctgagtgagtgactaagcccccagtcccttcccacactcccatctctgaactaaccaatctctcctttcctcaggctgcatagagcctggacctgggcactggggtgagctgagccggacaccagtcccatctaaaccccaggacaaagtggaagcagctgaggcaacaccagtggccctggacagtgacacctccggggctgaaaatgcagcagtgagtgctatgctgcacgctgtagccgccagccgcctgcctgtttgcagccagcagcagggtgaacccgacttgacagagcatgagaaagtggccatcctggcccagctgtaccacgagaagccactggtgttcctggagcgcttccgcacaggcctccgtgaggagcatctggcctgctttggccacgtgcgtggcgaccaccgtgcagacttctactgtgctgaggtggcccggcagggcactgcccggccccgcaccctgcgtacccgcctgcgtaaccggcgctatgctgccctgcgagagctgatccaaggtgtgggggccagatgggcgacagtgggcacatatggggagggaggggagactgaggcagagggaattagagaaaagaatacaagagcagagacagagatcctgggagagaagttctgagacagagacagggacacaggaagagactgagacagaaatgtaaagtaagggggagagatagacaggggtccagggaagagaatgggacagacaatgagaatagatcagaatttagtagatgtcagaagtggcatttcagattggtaggctgaggacacagtacacagtgctgtgataattggtcatacctaaggaacaaaacatgagatccctacctcataccatatacagaggcatcaggggaaaccaaaaggagtatgtacatgaccttggggacacagaagccttctgaacaagacacactgtgaaaaccatgaaggaaaaaaaagatagctttttgaccatgacataattaaaagcatccttgtgaccacaacaccagaaccaaagttaaaagatgagagtgaatgaagcagagtgagttaagttgccgttagggagaaggcacaagttataga

SEQ ID NO: 81 - DNA, 62731 bp, Homo sapiens
agattactggtatgagccaccgtgcctggccacctattgctttttaaagattatttttttattattattatttttttatttgagatggagtttcgctattgttgcccaggctggagtgcaatggcgtgatctcagctcaccgcaacctccgcctcccaggttcaagcgattctcctgcctcagcatccctagtagctgggattacaggcatgcaccaccatgtccagctaattttgtatttttagtagagacgaggtttctccaggttggtcaggctggtctcaaactcccaacctcaggtgatccgcccatctcggcctcccaaagtgctgggattacaggtgtgagccaccgcgcctggccttaaagattattttaaggcaaattacagaaagcaatttaatgcacatttctgagagttaaagatatttttgcccttgacattttatgaggacagttttcaaacatgcagcaaagttgagggaattgtacaaggaacaccttgtgcacttcctgggttctcccactagcactttgctacactgctttctgacgtttctacacacctgaccaccagctcaggatttatttatttatctatttattttgagacagagttttgctcttgttgcccagactggagtgcaatggtgcgatctcggctcaccgcaacctccacctcctgggttcaagtgattcttctgcctcagcctcccaaatagccgggattacaggcatgcgccaccacgcgtggctaatttttgtgtttttagtagagacgggatttctccatattggtcaagctggcctcaaactcccgacctcatgtgatctgcctgcctctgcctcccaaagtgctgggactacaggtgtgagccactgcgcctggccaatttttttttttttttagacgaagtctcactctgtcacccaacctggagtgcagtggcatgatcttggctcactgcagcctccacctcccaggttcaagcgattctcctgcctcagcctcctgagtaactgggattaccagcgagcgcctggttaatttttgtttttttagtacagatggggtttcatcgtgttggccaggtgtgagccaccatgcccagaccagttcaggactttttaggcatttccgagtaaacgcacgtatcagttcatcaaaaaacttaagcaatgcatatatcattagcgaaagcttctttttttaaaaaaaaaaatccaagatgttaacactttattggcttaagttctatagagatagcacaaaacagagaataatagagaactgaaagatgagattggaatcagatcctaactttgccacctcctagctgatcacaccttgactgaggctttaccatcttaaagccttaataaattgataagatgtaagaaatgtgggccaggcacagtggctcacacctgtaacccttgttgagggaccgaggtgggaggattgcttgagcccaagggttcaagaccagcctggccaaaagggcaagactctgattcaagggaaaaaaaaaaaaaatccagaaagaaatgtgaaaactttcagaacttcgtaggaaataaatatctgctaagttcttcttggatttaatattattactattttttatatgtcggtgcactttgaaaaggaatgaagtttaaggttttcttcttttaaaagtaaggcaatggggccaggtgcggtggctcacgcctttaatcccagcactttggggaggctgaggcaggcagatcacttgaggtcaggagttcgagagcagcctggacaacatggtgaaacgcggtctttaccaaagatacaaaaactagccaggcatgatggcaggcacctgtaatcccagctactcaggaggctgagacaggagaattgcttgaacccagcaggcagaggttgcagtgagccaggattgtgccacagcactccagcctgggcgacagagtaagactccatctcaaaaaaataaaaaattaaattaaggcaatgatttgcattcctttgcagtcaaaattcacattcagggaaatctggaatcaggtagaaatacaagcagacctatttatttaaagaggtgggctatagccgggcatggtggcgggcacctgtagtcccagctacttaggaggctgaggcaggagaatggtgtgaacccgggaggcagagcttgcagtgagccgagatcgcaccactgcactccagcctaagcgacagagtgagactctgcctcaaaaaaaaaatttttttttttaaataataaaaaaaataataaagaggcgggctgggcacggtggctcacgcctgtaatcccagcactttgggaggctgaggtgggcggatcacgaggtcaggagatcgagaccatcctggttaacatggtgaaaccccgtctctactaaaaatacaaaaaagtagccaggcgtggtggtgggcgcctgtagtcccagctactgaggcaggagagtggtgtgaacccgggaggcagagcttgcagtgagccgagatagtgccactgcactccagcctgggcgacaaggcaagactctgtctcaaaaataaataaataaataaatacataaatacataaataaataaataaagaggcatgtcggcctgggcatggtggcttatacctataatcttagcactttggtaggctgaggtaggagaatcgcttgagcctaggagcttgagaccagcctggacaatatagtgagaccccatctgtacaaaaaagaaaacaaacaaacaaacaaaggcacagactttgcactgtatcaatataaaagttgacatcaggatgatttcagtagcaagtaaaaaaatacagaaactcaaaatggcttaaacaataaagaagaattattggtccccaaagtaaaaatggaatcggtgtggtcttcaaatagttttctgcgtgtgttaaaatatacacataataatattattttaaccatttagaagtatacaatttagtagcattaaatatattcgcaatgggccaggcgtggtggctcacgcctgtaatcccatcactttgggaggccgagacaggcggatcacctgaggtagggagttcgagaccagcctgaccaacatagagaaaccccctctctactaaaaatacaaaattagtcgagcgtgggggtacatgcctgtaatcccagctactcaggaggctcaggcaggagaattgcttgaacccggcaggtggaggttgcagtgagcaacctgcactccagcctgggcaacaagagtgaaactctgtctcaaaaaaaaaacaaaaaaaatattcacaatgttgtataaccatcacaactatttgtgcccaaaatgtttccattgtttccaacaaaaactacccattaaataataactctggctgggcgtggtggctcacacctgtaatctcagcactttgtgagtccaaggcaggcggatctcttaagcccaagagttcaagaccagcctgggcaacatagggaaacgctatctctacaaaaagtgagactggtgtggtggtgcacacttgtagtcccagttactcaggaggctgaggtgggaggatcacctgagcctgggaggacaaggctgcagtgggctttgatcacaccactgcaccccagcctgggtgacagagtgagcccatctcaaacaacaacaacaaaaaacacaataactccccattaaagtttattttttaaaagtcaaaactacaatactcattttcacacctatcacaacgaacaattctgttattcattcattgtattcatagtgattcatagtgttcacattttcacatttctctgatagtctcataaatgtccttttttttttttttttgagatggagtctcgctctgttgcccaggctggagtgtagtggcatgatctcggctcactgcaacctccgcctccggggttcaagtgattctcctgccttagcctcccgagctcccaagtagctgagactaccagtgtgcgccaccacacctggctaatttttgtatttttagtagagatggagtttcaccacgttggtcaggctggcctggaactcctgatctgctaatttgcctgccttggcctcccaacatgctgggattacaggtgtgagccactgcacctggcctgtcctttaaaaaaaaaaaaaaaaaaagataggctggagtgcagtggcacaatctctgctcactgcaacctctgcttcccaggctcaagtgatcctctcgtctcagcctcctgagtagctgcgattataggcacacaccaccacacctggctaatttaaaaaaaaattttttttttttttgtagagatgggatttcattatgtttcacaggctggcctcaaactcttgggctcaagcaatcctctctccttggcctcccaaagtgctggaatattaatgtcttttaaaattggtttgttcaaatcagaatctgaattttgtttgaaatgtctattaagtttttaaaatctgtaactgttacccatccttttacatgccattaatttcttgaatcaactgggtctttggccctgtgcaatttttcacattctggattaggctggcagcatctttgtggtgctgttcaagatgtccttctgttcccaggatctcctgtaaactgggaattagatcagattcaggctcattctggcaagagatcctccctggaggtgctgggccacatcttgttgcatcacattgcaaaattgatggtcccatgtgtagtgacgcttaaaattaacgtgtccaggtcctgatccctctgttagaaactctgccaaccagccaggtgcacagtgactcacgcctgtaatcccagcactttgggaggccgagacgggaggatctcttgagcctaggagtgcaaaaccagcccagataacaaagtgagacgctgtctctacgaaaaacttaaaaaattagccagttattgtggcacacacctgtggtcccagctacttgggaggctgaagtgggaggatcacttgagcctaggaggtcgaggctgcagtgagctgtgttcatgccactgcactccagcctgggcaacagaggaagaacgtatcaacctttcacttgccttagcagagggatcctttaaaactagatcagatggtatcactcctgttcatatcatagttaaaacaaagaccaaagtttttgccaggccaaggcttgccctcaccccaagcccaccttccctctactcctgcccccaactgttccagccacaaacaggcctcctcacagttcttcacatgcctgccacacgcctgcctctgggcctttgcactggctattccctccacctggaatgctgttccccacagggctcacttgctaatttacttcagatctcaatcatagcctgagagaagccttcccccatcatcctctctaaaacagcacccacacctctcactatcccctgctttcttttcctttttctttttttgtttttgtttgtttgtttgtttgtttgttttttgagatggagttttgctctgtcgcccaggttggagtgcaatgaagcgatcttggctcaaagcaacctcctccattggggttcaagtgattctcctgcctcagcctcccaagtagctgggattacaggtgtgtaccaccacacccagataattttgggtttttaaaattttttttttaagacggaatcctgctctgtcacccaggctgtagtgcagtggcgtgatctcggctcacttcctgcaacctctgcctactgcattcaagcaattctcctgcctcagcctcccgagtagctgggactacaggtgcgcaccaccacaccaagataatttttgtatttttagtagagacagggtttcaccatgttggccaggctggtctcaaactcgtgaccttgtgatccgcctgtctcagcctcccaaagtgctgggattacaggcgtgaaccacagtgcctgactaatttttgtatttttagtagagatgggtttcaccatgttggccaggctggtctcaagctcctgacctcaggtgatccgcccacctcggcctcccaaagtgctgggattataggcatgagccactgtgcctggcccttgctttatttttcttcactgcacatcttgcaacatgataagtatttatgtgagtgttatttctcttcccctttgaatggaaactccagtaggatgtggacttgtcttgctcattgtagaaaccccaccccagcaccacctgtccatcttttcttttcttttttttttagagatagggtctcactctgtcatccagactggaatgcattggcaccatcatagcttgttgcagcctcaaactcctgggctcaagcgatcctcctgcctcagtctccccaagtagccaagactatgtgtgcaagaacacctggctaattaaaaaaattttttggaagacacagggtctggctatgttgccaggctggtcttaaacccctagcctcaagcaaccctccaacctgggcctcctaaagtgtgggattataggtgcgacccactgcacccagccccgaatctttttctcttttttggggggggaggggggatggtctctgctgtcacccaggctggagtgcagtggcataatcctggctcactgcaacctccacctcccaggttcaagagattatcctgcctcagcctcccaagtaactgggactacaggtgcacaccaccatgcctggctaattttttttgtatttttagtagagatggggttttaaaatgttggcaaggctagtctcgcgctcctgacctcaaatgatccacccacccgggcctcccaaagtgctgggattacagatgtgagccaccaagcccggcccccgtctcattttttaaaatgcatttcaaagtaaattgcaggcacatagcaggtgctcagcaaatagttcatatagttcatgagtgaatgaattcacaggttcaagtaggccatcaaccagctgggtccactgagccctagggtgggcaggggccccccaacatatctaaacaagtgaacagatctttgcacatatttgcacccctcaaaaatgccacaataggccgagcgtggtggctcacacctgtaatcccagaactttgggaggctgaggcaggcacatcacctgaggtcaggagtttgagaccagcctggccaacatggtgaaaccccatttctactatgaatacaaaaattagccaggcattacggtagttcctgcagtcccagctactcaggaggctgaggcaggagaatctcttgtacctgggagttggagtttgcagtgagcccggattgcgccactgcactccagcctgggtgacagcgagagaccatctccccaaccaaaaagaaaaaaagagatcgggctgggtgcagtggatcacacagtgggtcacgcagtgggtcacgcctataatcccatactttaggaggcccaggtggaatgattggccaggcttacctcgtgatccactcgcctcggcctcccaaagtgctgggattacaggcttgagcagccacgtctggcccctaaaacagttttttaaaattagccaggtgtgcttgcacacatagtcttggctactcggggaggctgaggcaggagggtcacataagcccaggagtttgaggcttcagcaagctatgatggcgccactgcattccagtctggatgacagagcaagaagacagaatgcttgaactgggaagtggagtttgcagtctgctaagatacagccaccgcactccagcctgggcgacagagtgagactctgtctcaagaaaaaaaaaatgccacaataaggaattgtcccctttatggcaggccttttacagggcggtgaagatgcagcagttcccaaaatatacccagtcccttcccccgcagagcccacaggccagtgggaggagacagatgtgagacacataatcatgccaataaatatataatgacaacccaggcaaagtgttgccaaggaaagggacagcatgttgggagtgaacaatatgaggacctagattgggctgggggggccaggcagtgatgcgatggagaagggatgatagagttggggacaaagtgctgcaggaggttgctccaagtcctctgagggggctctttgggtgagaaagcgagagaagcctggggaggcgaggggagggtcacagaaacataaggagtttagggttctgctgaaaggtttggggcagaggtgggaaagggtttggtttgagattgggaagaagccttctgactgttgagtgggagacaggttggaaggagcaacagaagccagcagcccatggccgggcacagtgacccacgcctgtaatcccagccctttgggaggccgaggcgggcagatcacgagttcaggagttccagaccagcctggccaacatggtgaaaccccgtctctaccaaaaatacaaaaattaacctggcatggtggtgcacacctgtaatcccagcaactcaggaagctgaggtgggaggatcacttgaacccaggagatggaggttgcagtgagccgagatcgagccattgcactccagcctgggcaacaaagcaagactgggtctcaaaaaaaaaaaaaaaaaaaagacacagcccagggagacaacggtgaagggccctaagtggccagtgacaaggagctgggagcttgccctgagggcagcaggaggccatgggcaagcagagaagggacagggtaggatttgactttcagaaacagtcctctggttgctaaatgggagaaaggagtgacagtagaggcaggagaaggcaggatcagacgggggtgctgggaaggggcaggtagaagagacatcaggaggccaaacagataggactttatgatgcaccgtaggtataccagtacccaaacacaggtggccaagagcagagggatagacgcccagcctcctcctcacagacatccaggcatgcagagccctccacgtgccaaacacacagggccgaggaatggaagtgcagcagagccgatacgcaggcagcagatctgcaataaccaggacacacagtcccaccagaaggagagagcagtggaatgatcagggctcactgcagcctcgatctcttggactcaagcgttcctctcactccagcctccctagtagctgggaccacaggcacacgccatgatacctggttaagttttaatttttaaacttcttgtagagatgggggtctcagtgcattgaccagtctggtctcgaactcctgggctcaagcgatcctcccaccttggcctcccaaagtgctgggattacaggagtgagttactgtgcccggccaacaactattcttattcccattttacagatggacaaactgaggctcaggaggccagtcacttgcctgtagcccacagttagtggtagcactgggattccaacttgggtccccttcatgtcgcctgtatttggtgtcccatttaggcgtccatgcaggttttggcgtgtctgaagatctgtgtctccccaagtaagtgtcccccatggatgcccacccagccgtgtcctcctgtctctgaggtttctccaggaatcgagctcctggcctggcttgtctgagtgtgtctgtgggccagtagcatgcccctgcccgtctgggtccctctgcgtgtctctgcttgtcctagcctgtgtgtgtcagtgacgtctaagagtgtgtgtgcgtgcgtgcgtgcgtgcgtgtgtgtgtgtgtgtgtgtgtccttgtccgaggagccgagagagtgagggggaatgaagggccaaggaggcctggctggggctgggctgggggtggaggcggggagaggggcgtcacggcctgagctgagaagggagtggagttctggaggaatgtttaccagacacagagcccagagggacagcgcccagagcccggatagagagacacggcctcactggctcaggacagggggcacagccaccagggtccccttccccctcctcagctccctccctggcccctttaagaaagagctgatcctctcctctcttgagttaacccctgattgtccaggtggcccctgggctctggccctggtgggcggaggcaaagggggagccaggggcggagaaagggttgcccaagtctgggagtgagggaaggaggcaggggtgctgagaaggcggctgctgggcagagccggtggcaagggcctcccctgccgctgtgccaggcaggcagtgccaaatccggggagcctggagctggggggagggccggggacagcccggccctgccccctcccccgtgggagcccaacaacttctgaggaaagtttggcacccatggcgtggcggtgccccaggatgggcagggtcccgctggcctggtgcttggcgctgtgcggctgggcgtgcatggcccccaggggtgagtgatgggggctccttggggcagggatcccctcggaggggctggggcaggggtaggaggtgggggatgatggcaggtgtggggggcctgggctggcttagggagtttccttgggaccacagaaaagggacttcaagggagggagacacagactcagagacaccaagtgcggcagagggagagaaagactgagagaggaactgaagggcaggggggacagaagagaggacccggagagacagacagacaaggagaagctgagggcaggggtgggggctggacctgagaagggggccatggggagaggggctgagctgagggtcgccaggaaggaagaaatctttccgaaggggcaccgagtcaggcggcgggatgaggagggctctggagccctgggggaaaacccttctccctgccaacaccacccccctgacccgccacttgtccctaccccaccagtccactccatctctggggaggaggctctcactttgtctctctgtctctgcctccagctctgctatctctgtgggtctctgtttctctctctttcacagtctctgcctttatctctccctgctctctgagtctctctctctcttctcagcctccctctgtgactgtatcccccctccgcccccaccttttcttctctcttgagggctgtttcttcattttttctgtcttgccttgtatctgtgctcctctctgtctcatctcccctgcctttctctggcttctccctccgccaccacccttatctccccccaccaccacccttatctctctcccccaacccctgattcttcccctccatccaccagcaccagcgcgacctgttaagtctctagagacctaagagaggacggagggggcaggggctggccctgccaggcagtgcagggcgtgggaggctgccagatcccgagcctccttcccgacgggatggacgctagatcccagtcccttgggagggctcccgtcctcctctcagagcctccgccctccaccccactctgaggtcactctgcaactatgtcggcctaagggcctggcggggtcctggccgccggtgggcaggcaaggacagggtggaactgagggccggaaggagctggggggttcctaagctaactcttcccatctcccctccaggcacgcaggctgaagaaagtcccttcgtgggcaacccagggaatatcacaggtgcccggggactcacgggcacccttcggtgtcagctccaggttcagggagagccccccgaggtacattggcttcgggatggacagatcctggagctcgcggacagcacccagacccaggtgcccctgggtgaggatgaacaggatgactggatagtggtcagccagctcaggtgtgtggccacatccccgaatcccactcccacctccgtcacacagagggcagaaagcccacctgggtgggaaccccagtttgaccacttgtcagccgtgcggctttgagcatgtgatggaacctctaggtttcgttttcctcttctgcaaaatgagttaataataggacatacttcgtggttgtcatgagcttccagactggacaccctctttccgttctgacagaccccctcccagtgtccagctctgaccctgaacctctctgtctctcctcttgccctgtcagaatcacctccctgcagctttccgacacgggacagtaccagtgtttggtgtttctgggacatcagaccttcgtgtcccagcctggctatgttgggctggagggtgagctctggggtcaggggtcctgaggggtcagaggacatgtggcgctcataggttgtgggaagtcaggaatcctgaggggtcaaggtcaaagggtgctggaggattcaggatgaacctagcgtcatacagcctaagaatgtcagagttttgggtggtcaagaagctgggagtccatataagttatggtgccaaggctgggggattatatgttctgggtgaaaagacttcttgggggtagttggatgtcctaggcatcagacaccatcaggtcacaggaggccattctggtcttcagataaggcgtcagaggcacgcaacgtacccctgtccccacgaccccagcggtctcttttttctcatccatagaatgagatgaggatgagctgtcagacattctggaagagagacatgaggagctcagctatcgtggggggtctgacatgggaggaatcagatattggggtcacgtgtgtgttgggtatggctcaggtgccctcggggatcagataaggcaagtcaatgaccctgcagggtgggtttgctgcccaaagcctacagcatcctagtggtgagtcaggcatcttggggcctcagagggaccccagcctctaccactgcccaccccgctaggcttgccttacttcctggaggagcccgaagacaggactgtggccgccaacacccccttcaacctgagctgccaagctcagggacccccagagcccgtggacctactctggctccaggatgctgtccccctggccacggctccaggtcacggcccccagcgcagcctgcatgttccaggtgagtccggggatgtgggtcagctccgaatagggggccgggcagggctgaagtcaggagcaagggaacattgctacctctgcgtgagtgtctgactgtccttctgtccctcactgtctgtctctctcgtttctccctctgagtctgtctctgcctctctgtctctacctatcttatttctctccgtatgcctttttctgtctctttctgtctcttggtgtgtgtgtctttctgtctctctttgtatgtgtctctctctctgtctctctgcttctctctccctccattcaccccggcctctctctgaatagaattctttgtcctgggtttcctctgagctgttccatggctcgagtgcgtgtgggcctggtgcccctttgtcagcccttgacccaagcagggcaccggaatcaaccgtgccctcctctcctccgcctccctccacaaccggcccacctcctgccctaacaagcctgctggcctcagtcaaagggaggatgtccagcccggtccccactggggagatggaacccaaagaagagagagcaggaagaaagtaggagacagaggctgggcgtggtggctcacgcctgtaatcccagcactttgggaggctgaggcgggcggatcacgaggtcaggagatcaagaccatcctggctaacacggtgaaaccccatctctactaaaaatacaaaaaattagccgggcgtggtggcgggcgcctgtagtcccagctactcgggaggctgaggcaggagaatggcaggaacccgagaggcggagcttgcagtgagccgagatcgcgccactgcactccagcctgggcgacagggcgagactccatctcaaaagaaaaaaaaaaaaaaagaaagtgggagacagagagagatagaatgacatacactggaagggacaggccacagtgacccaagatgaacatagacaggacagagaggccgggcatggtggctcacgcctgtaatcccagcactttgggaggctgaggcaggtggatcacttgaggctgggagttcgagaccagcctggccaacatgacaaaactccatctttaccaaaaatacaaaaattagccaggcgtggtgacgggcatctgtagtcccagctacttgggaggctgaggcaggagaatcgcttgaacccgggagatggaggttgcagtgagccgagatcacaccactgcactccagcctgggtgacagagcaagactctgtctcaaaacgaaaaacaaaacaaaatgaaagacaggacagggaagttggagtgacagaaaccctctccttcttggggaccattcccttctgcaccatgcagacgaggaaggaccgagctcagggttatgcagtggtcaggggcatcactgggggaccctggattcagggggttctccctactgaaggaggaaagacagaggagcagatggcagaggctctgtaaaggaaggaggctgcagcctggagggcatcagcttcccgcactcccaacctgctgcctctctctgctggaatgaggaggggccttctgactgggggtctccagggtggagggaggagctcacattctcagcattcctgggaccctgagttgcaaggaagacctggtgagcatgctgaccccagaggagtgactcaggcccatggctcgagtggctgagtagggaccagggttggggatcgggcatgagtcagcctggcaggtcccatgagaaggggaggggagggagagaaatgggggctgcacaggtgtgaggatctgtgcatgtctgtgtggtggtggtggggtgtctggatatctgtgtgttctggatctgagtgttagtgtatccgtcagcacaacctctgtgtgagggtgtgccttggcgagggtggacttctgtggatgtcccatgtgtggtgtgtgtgtgtgtgtgtgtgactaaatatatttccttcagcttggattctgtcccaatatgtgtttggatctttatagcatgtctctctctctacgtttcttaggggttgcccgtgtgtgggtgtctgtgtgtgtgcgcatgatggagtgtaccagtgtcagcctgtgtctgtccctcttttttgtgtttgtgtgttcacagctgggactcactgtatgaaagtaaagtgtgcctggagggtagtgggtttggggctatggtgcacacctctctgtatggaggtggtagtgtcagcccacaggtgtgcagctatgggtgtgagagtgtcctagtgagagcttgtgttcccttgcagaatcagaacgtgtccatggataacttgtgtttcttaccaccttttttcccccttattttttttcaagataagctcccgctgtgtaacccaggctggagtgcagtactgtgatcatggctcactgtagcctccacctcctgggctcaagcaatcctcctacctcagcaccctcccacccctcaagcagctgggactataggcatgtgccaccatacccagatagtttttgaattttttggtagagacagagtctcgccatgttgcccaggctgctcttgaactcctggcctcaagtgatcctcccgcctcggcctcccaaagtgttgggatttacaggcgtgagccactgctctcaaccctcagcctcttaccagctttctgtgtgtgtccatagatgtctctgtggcgtgtgtgtatatgtcacagggtaagcatgttggtgtatgactgtagtcacagacctgtgtgtgtgtgtgtgtgtgtaacagcaccctctgcttctctctggtctccctgtgtgtgcactggcccctgctgcctctgagtacatgacctaaggatgcttaccagtcagcgtatagatgtgtctctgtgtcaatctatgtgtccatggcagtgtctccatccttgtgtgtctgcatcaggcctgcgcatctacgaaactgtgtttttttgttttttggggtttttgttttgagacggagtctcactctgtcacccaagctggagtgcagtggcacgatcttggcttactgtaacttccgcctccggggttcaagggattctcctgcctcagcctcctgaggagctgcgattacaggcacgcctggcttatttttgtatttttagtaaagacagggtttcatgacaggtttgtcatgttggccaggctggtctcaaactcctgacctcaagtgatccaccggcctcggcctcccaaagtactgggattacaggcgtgagccaccgcacccagcgcaaatgtgtttttgtatcagtctgtgtctgggtgaacatgaaacctgggcgcatccagctccatcttatggcgtagatggaggcttggctgtgaggtgtacgcgtcggtgtgtctgtgtctgagcaggtcaaaatgacccttcattgtgtcctggtgtgtatctatctgtccacctcaactccatgtacgctgttacgtggtgtgtgtctctgaatatacagggacatttaagtttctgtgtgtgttggcatcagcctagatgtacattgcgtcgctaggtgtttgtaatcaatgtgtacatgtgtgactgtgtgtttatgtgtttgtcccacgttggcttgtatgcatacatgtctctttatgaatgtacatcagtgtcagcccgcgtgtatatgtgtgagtcacggtgtttttgtgtcactgtgtttgtgacatcagcccttgcatatctgtgtgccgttaacttaccaagcgctgcgtcttctgtgctaataacagcccctgtgtgtttaagtgtgattcattgtgagtgtgtgtgtgggggggtttgctgtgtgaaggaatttcgtccgtttgtgtgcgtctgtccctctatctgactcagggcgtgcccctcctccttccatccctctcattctctggaaaagctggggcggagagcaggggttgtggggggatggtcaggacatctggaaagcacatctggaatcggcctgctcctgtcgtcttgcggtaaagcaagaaccttctggaggggaaggggtcccagttcctcctgtccccttcactcaaggtgcggccgttggggcctgggaagggggatcccggctctggctccgcgcccccgaagccggccggaagcgctggggtggggaggtgcccccggtgactcacgcgggggcaggaatgctgcggtcggaacgggacccggctccagaacccacctccagccccagggcttctccggccggcggcgccagctcccgcgcgctgaccctggcggggccccacgtgccaggtggctggacccgacccaggctccccgcccccactcgggccgcccgcccgggactgtactgtttctcctccgggcggcgcgggggctgcgggcgcggggccttcagggcgcggaggctgcgggagcgggcacctgaccttgtctgggaacggccacctaggaagccgcgactgaggagctcccctaccctcccctttccggcctctgcagactttgcaccattccactccctccgctgacggagaaaaggaaactttgtgtctgcggatggagagcctcccttgccaacgcggtgggaacagaggcgtacacgcacggagcaaacacgagagacacgtacacagatactcaacacatgcacgtacacaccatccacagatacacgcagggtcacaaacataccagctcagaaacacaaacacagatgcacaagcacacgcgtaaacaacacgcagaactgcagtcgcacttacaagacttggtcccagggccgggcaccgagtggctctgcctgcgatccagcactttgggaggccgaggcgggaggatcgcttggggccagaagtttgagagcagcctgggcaacgtggtgagactctcctcttctctacaaaaaaaaattgaaaagttagccaagtgtggtggccgcctgtagtcccagctgcttgggaggatgagacaggaggatcgcttgagccctggaggtcaaggcagcagtgagccgtgattgtgccactgtactgcagcctgggagatagagcaagaacctgtctcaaaaaacaaaacgaaaaacttggtccttcttacatcctagcgcagacattgtgtgtgtgtgctgggggaggggggtgtctatgtttctacgtgtatctgtgttgggggattccccttattcaccaggatacgttctctaagagcccccacaaaagcctgaaacaatgaataatactaaaccctgtatatactacacataactttctttttccttcacaatttcgcagatagattgttttcttactatagatcttagcaacctcagtacatatatatatgattatctttttctaagtggagaattttcaccttttcacttaaaaggaagcactttaaggcttctctttggcctatccgaattgcagccatcactattttgcaccctggggcctttttttttttttttagacagagtctctctctgtcgcccaggctggagtgcagtgtggcgaccttggctcactgcaacctccgcagcccgggttctagcagttatcgtgcctcagcctcccgagtagctgggattacaggcacgcgccaccatgcccggctgatttttttgtatttttagtagagacgggggtttcactgtgttgcccaggcttgtcttaaactcctaatctcaagtgatccacccgcctcggcctcccaaagtgctgggattacagatgtgagccatagcacccggccaggcgattatttagataaataagagtttcttgaactctgcacttgagcactgcagtaccaggacagttgatctgatagctaagtgacttacagacaggtatcagatacagcactgagatgctggacaaaggggggattcacgttctaggccaaccagagtgggatggcatgaggtttcatcacagtactcagaacggcatgcaatttaaaacttaggagttatatctggaattttccattgaaatatttttagaccaagtgtaactgaaacctcaaaaagtgaaacctcggataaagggggactgatgtacgttgtatagcggtttgtgttgggtatctctgtgtgcttgcaggtctgtgtctcttgtgtttgtctctgtaattgtacgtgcttctgtgtgtgcacgctggtcataccaacaccaacaccaccacgttagggagggaaggcaatccaccttcactcgaaaacagttactcaaggccgggcacggtggctcacacctgtgatcccagcactttgggaggctgagatgggcagatcacttgaggtcaggagttcgagaccagcctggccaacatggtgaaaccctatctctactaaaaattacaaaaattagccgggcatggtggcgcgctcctgtaatcccagctactcagaaggctgaggcaggagaatggcttgaacccaggaggcagaggttgcagtgagccaagatcatgccactgcactttagcctgggcaacagagcaagactctcaaaaaacaaaagaaaaaaacagtcaagacacaataggtgaactcccctatggaattacacatgctcatatttctacacctatgcccaggaatgctcataagtacacagctgaacacaatttcactcactcattcaacaagcatttatggcacacctattgtgtgccaggccatcctgacacagcaggggacgaaacagacacaacccctgctctcctagagctgacattctagtgggagaaactgacaatgggcaaggtacttgggtaacaggtaaagtatgttgggtgatgagaagaaccaaagaggaaaagtaaagcgggaaggggatagatttggagaggaagctccaattagctccaattttattgtattttttctttctttctttttcttttcttttctttctttttttttttgagacagagtttcactcttgttgcccaggctggagtgcaatggcgtgatctcagctcactgcagcctctgcctcctgggttcaagcgattctcctgcctcagcctcctgagtagctgggattaaaggggcctgccactatgcccagctaattttttgtatttttagtagagacgaggtttcactatgttggccaggctggtctcgaacttcggacctcaggtgatccacccacctcggcctcccaaggctgggattacgggcatgaaccaccgtgcccagcctttatttttcattttattatttttagtttttttgagacagggtctcactctgtcacccaggttggagtgcagtggtgtgatcacagctcactgcagcctccacctccccgggcacaggtagtcctcccacctcagcctcccaagtagctgggactacaggtgtgcaccaccacacccagctaatttttctcttttttgtagagatggggtctcaccacgttgcccaggctggtctctaactcctggcctcaagcgatcctcctgactcagcctcccaaagtgctgggattacagtcatgagtcactatgcctggccaagctccaatattaacagggtggccaggcctagcggactgagaggtgttgttgaggaacaaaaatgaaagaagagggtgcgagtcatgtagacatttgtggaagactgttttgagcacagggaacagtgcacagttcttggagtggaaacatgcttcatgtatgtgttccagagacactggaggccagtgtggccggagaagagcgtgtgacagggagagtgggagaggggttggtaggaggcgagcttagagatgaacagacatgtctccattgatgtacagccatgggccagtttccctaagtgtgtctagcaggtgtgtgtgctcatacttgtgtccttgtgagttagtgagggtgcctgtgtttgtgcatgtgagtgtgtgcatgtttgtgtgtctccttgtgtgtgtgtgtctgtgtatgcttttgtgtgtctatgtgtgagtatgtatatatgtgtctatgtccatatatatgagcacgtgtatttctgtgtgtgtctatatatgtgtatatgagtatgtgagtatctaggtgtacgaatctgtgtgtgtgagacacagtgtgtgtgtgtggctgtgtctgtttctgtgtctgtgtctgtgtctgtgtgtgagcatatgtgtttatatgtgtgtgtatgagtatgtgtctctggggtgtaagaatgtgtgtgtgtgcctgtgtgtgactgtgtgtgagtctgtgtgagcatgtgtgtgtatgagtatgtatctctctctggggtgtaagaatgtgtgtgtgtgtgtgtatgcgcctgtgcctgtgtgtgtgtctgagcatatgtgtctatgtgtgtgtatgagtgtgtgtctctatctggggtgtaagagtgagtgtgcctgtgactgtgtgtggttgtgtgtcttcatgtgtgtttgtgtatgtgtgtttttgtgtgtgtatgcctgtgcctgtgtgtggctgtgtgtctttgtgtgtgtctgtgtctgtgtgtctgtgtgtatgagtgtgtgtgcctgtgcctgtgtgtggctgtgtgtgtctttgtgtgtttctgtgtgagtatgtgtgtctatgtgtgtgtatgagtgtgtctgtctctggggtgtaagaatgtgtgtgtgagacagtgtgtgtgcctgtgcctgtgcctgtgtgtgtctgtgtgtgtctgtactatgtgtgtctgtgtggcgggaggttagggctgaaaccaagccatccttgtgtttggggatggaggctgtgttcctaactcattgccctcaactctgctaaccctcccttcaggcaagtgcctgtgtgggctgcactgcccctggtcaggcaggccatggtaggagtggcccggcatggccccggagcccttcctgcccctctctgatattggacccttccctcatatgactccctagggctgaacaagacatcctctttctcctgcgaagcccataacgccaagggggtcaccacatcccgcacagccaccatcacaggtgacagagttgggaggtggggagctgggcgtcagagggtggggtttgggtccggggtcagagtgggggcagagagcagggtagggagctttgagcaaaggctccccagggtcaatctctcccgtttgtccacagtgctcccccagcagccccgtaacctccacctggtctcccgccaacccacggagctggaggtggcttggactccaggcctgagcggcatctaccccctgacccactgcaccctgcaggtgagactcccaaacttggttcatttcagtctcaggcctccttccacccacatccacaacccccatcctctccctgggaacccaccacttctcggccactgttgagaagcagtagagcctggggggttaagccagatgtcctgggttcgaatcctagctccaccaccttctggctgtgtgaccttgggtaggtggcttaatctgtccggggctcagctctcttgtctacaaaatggacataatggtagtgcctacctggtatgcttagtgtgaaaattcaatgagtgaatgcaaattaccaacttaaaatggtatatagaacataggaaacaaatttaacaaaattggccaggcgcggtggctcacacctgtaatcccagcactttgggaggccgaggtgggcggatcacttgaggtcaggagttcgagaccagcctggccaacatagtgaaaccacatttctactaaaaatacaaaaattaactgggcctggtgggacgcacttgtagtcccagctactggggaggctgaggcaggagaattgcttgaacctgggaggcggaggttgcagtgagccaagatcgtgccactgctctccagcctgggtgacagagcgagactctgtctcaaaaaaaaaaagaaacaaaaaaaaaaaaaatttaacaaaatgaaaatgatcagctgttttaattattttcagtattagtgatgttaactctagccagagtgggagccctgagacagcagagtctggagccatttctgtcaccactggatacccagaaccctccacttctcccatcccagccctggccactctgtgtggtcactgtctggggatgggtctgtcccctactggaatgtgagctctgacagggcagggctggagctgtcccagtcaccactggctcctcattcttgcccagcacaggaccagacatagagtagggaatattcgctagaaggatatattacaacccagatgagctagacccagcctctgccctcaagttgctcctagaataagaaaaccaaaaccaggccaggtgtggtggcttacacctgtaaccccagcactttgggaggccaaggctggtggatcacctgaggtcaggagttcgagaccagcctggctaacatggtgaaaccccatttctactaaaaatacaaaaaattagccgggtgtggtggcacacacctgtaatcccagctactcaggaggctgaggcaggagaatcccttgaaccctggaggcagaggttgcagtgagccgagatcgtgccattgcactccagcttgggtaacacgagcgaacttccgtctcaagagaaaaaaaaaaagaaagaaagaaagaagaaaaccaaaaccaaaacaaaactcacagatctgtaaatataaggcctaattctggtctgaagttctctgagattagaaagttggagatggggggtggacagtgcctatgatggtagatgacagtaatgaagaatgaccaatttctactgagtgtccgctgtgcaccgggtcttgcattaacgcacacctgctcgtgtgtttgtgaaggagggtctatggatacacccattttccagatgaagaaactaaggctcagagtggttaaccagattgtccaaggtcacatcaaacccatgtcatgctcctaacctccttagaaactgttttttgttttttcttttcttttttttttgagacagagtctcgctctgttacccagactggagtgctgtggcgtgatcacggcttattgcaacctccgcctcctaggttcaagcaattctcttgcctcagcctcctgagtagctggtattacaggcgcccaccaccacgcccagctaatttttgtatttttagtagagacagggtttcaccatgttggtcaggctggtctcgaactcttgacctcaagtgacccgcccacctcggcctcccaaagtgctgggattacaggcgtgaggcaccgcgctgggccctgagaaaatgtttagagtcagtgcttgattaaacaggaattgtcttatacttacatgctctgagcacaaccccatctgcttgtcgttttaaacctagaaaatagtggctattggctgggcatgatagctcacgcctgtaatcccagcacttcggggggctgaggcaggtctgtacaaaaaattcaaaaaaattagctcagtgtggtggcacacacctgtagtcccagatactcgggaggctgaagtgggacaatcacctgagcctggcagtcaaggctacagtgaggcaggattgaacctctgctctccagcttgggtgacagagtaagactctgtctgagaaaaaaaaaaacaaaaaacagtggctattaatcttcccgttttcaaggtgaggaactgaggcccagagaggggccccctctctgggcctcagttcctcccatcctcctcccctccccggggctagaaagccgaagctgagattcaatcccagaggccagctggatttgggagacctcaaatgccaggtcaggcataagttgcactctacccacatcaccaagtgtccccaggaaagcagaagtgtgtcctcttccctttccaggtctcacttcctgctgcacatgggctagggctgaagagttccagtgggagggtcacagccgtcccagggaaaagagaagtgggagcaggcatggggagaccaactgtctgtacccatctcctctctgtcctggtagaggttcctcttcctgtctgtcactgcaggtcagagagcaggcatggtgacagcctcaccccctcctcgtacccaccatctgcccccactcctccccaggtctcatggtggtgtcatctccctccatgggggctgtgtgactttgggcaagttgctgaacctctctgggccttggcttccctgtctgtaaaatggggatgagaaaagaaattgaccccatagggtggtagtgcgaagtcaatgagttcatccagtaatgtgcttgacagagagcttggtacatatttggcactcaagaaatatttgctaggccgggtgccatggctcacacctgtaatactagacctttgggaggccgaggcaggtggatcgcttgagcccaggagtttgagacctgcctggccaacatggtgaaacgccatctctccaaataattaaaaaattaggtggggctgtcattacaccactgcactccagcttgtgtgacagagtgagaccctgcctaaaaaaaagaaaaaagaaaaagaaagaaagaaagaaaacaaacgttagctgttgataattataatgtgcaaagcagtttatatgcatcatgtcattaaaccttataccctgacaagtaagaactgtgatgcccattttccagagacagaaactgagactcagagaagttaagacactcactctaggtcacacagcaaacaacatccaacacaggacttagatccaaggaatctggctttagagcccacaccctgtggcagtaaactccttcctgacatactgtgtggctgtatggctggagtctccagggtgaaggggaagcccttggctgcaccattcctgaggcgtggctgtgaattgtgtggttatgggggttttgtggttccatgtggcagggctatacagatgtgtacaccagtggtggccccctccactctgagtgtgccattcctcgggcggaataggtatgggaacctgtgccgctatgcagagcttgacacttgttgccaggaaacacacataaaataataagtgacaggccgggcacggtggctcgtgcctgtgatcccagcactttgggaggctgagcgggcagatcacctgaggtagggagtttgagaccagcctgaccaacatggagtaaccctgtctctactaaaaatacagaattagccgggtgtggtggtgcatgcctgtaatcctagctactcaggaggttgaggcaagagaatcacttgaacctgggaggcggaggttgcagtgagccgagatcatgccattgtactccagcctgggcaacaagagcgaaactccatctcaaataaataaataaataaatagatagatagatagatagatagatagatagatagatagataataaatgacagtatgcacaagcagtcttctaaatgcttacatgccccaattcagtcaaccctgtgaagtggggagccactgtcatcccattttacaggtgagaagactgaggcacacagctagggaatgatagagcctggatttgagccccagatccagcatccgtgctcctcagcactaggctaaactgcctctgtgcacagacaagaggtattgttaccattactgatattcttaccgccagtagagcaaagactctggggacaggatggggtttaggtcccagcttcatcagtgacaaactgatgaccttgaacaagtgattccgtctctctgggcctcagtgttgtcatctgtacagtgggaataagcataatgcttaccacaggacaacaggattgatgtgagggccaaatgaattcagatttgtcaagggctaagaaaggcactcagtacatgttggacgtgttttatctttttttattaagataatatataacatagtcaggtgaggtggctcacgcctgtaatcccagcactttgggaggccgaggcaggtggattacctgaggtcaggagtttgagaccagcctgggcaacatggtgaaaccctttctctacacagaataaaaaaaaagccgggtgtggtagctcacacctgtaatcccagcactttgggaggccgaggggggcggatcacttgagatcaggagttcaagaccagcctgaccaacatgatgaaacctcgtctctactaaaaatacaaaaaagttagccaggcatggtggcacatgactgtagccccagctactcgagaggctgaagcagaagaattacttgagcccaggaggcggaggttgcagtgagccgagattgtaccactgcactccaacctgagtgacagagcaagactctgtctaaaaaaaaaaaaaaaaaaaaattagtcaagcatggttgctcacgcctgtaatcccatctacttgggaggccgaggcatgagaattgcctgaacctgggaggcggagattgcagtgagccgaaatcacgccactgcactccagctcaggtgatgaaatgagactcataggccgggcacggtggctcacacctgtaatcccagcactttgagaggctgaggcgggcggattgcctgaggtcaagagtttgagaccagcctgactaacatggtgaaacgctgtctctactgaaaatacggcaattagtcgggcgtggtggtacgcgtagtcccagctacttgggaggctgaggcagaagaattgcttgaacctaggagacggaggttgcagtgagccaagatctcaccactgcactatagcctgggcgacagagcaagactccctctccaaaaaaaggaaaaaaaaaaaaaagaaaaagaaatgagatgtataacatgcataatcttcagtgtacctctagatcaagctcgtctaacacatgtggcccaggatggctttgaatgcggcccaacataagttcgtaaactttcttaaaacattatgagatttgtttgtgatttttttttttaacgcatcagctatcgttagtgttagcgtattttatgtgtggcccaagacaattcttcttccactgtggtccaagaaagtcaaaagattggacacctttgagattgtttaacacacatattcaccatgtaaccaccatccaaatcaagacacagacccttccagtccccaagaagtctccctcaggccccagagatggccacccttctgcttctagaacattgcttttgcctgtagtataatgtcatataaatggggcctcacagtatcgtgctattattatgatgatcattactattatttgagacagagtcttgctctgttacccaggctggagtgcagtggtgtgatcttagctcactgtaacctctgcctcccaggttcaagtggttctcctatcgcagcctcccgagtagctgggattacaggcgagcgccaccacatccagctaattttttacatttttggaagagatggggtttcaccacgttggccaggctggtcttgaactcctaacctcaagtgatcgcccaccttggcctcccaaagtgctgggattacaggcgggagccaccgtgcccagtctatttgcgttattattgtcatcacactattattatcggtgctgaccacccgccatgcactgtggcatcctttgggcataactacacttaatctttaaacaatcctgtaaggcacttgatcctctaaggccccgtgtgcccaaggaaaaaactgaggctcagagagggaagagtcttgccagaggtggcttttggaagtggtgacagaaccacattgtatacagccaaatgatctccttgctttgcaaatccaggtgcccgtgttatcctagcatggcactgcaacacacacgcacccttgaaaagttgtgtagtcacaccagaccaccaccactgggagctgtgtgaccatctcgtgtgattgcttggctgtcccgtcctcacacccttgcctctcctcaggctgtgctgtcagacgatgggatgggcatccaggcgggagaaccagaccccccagaggagcccctcacctcgcaagcatccgtgcccccccatcagcttcggctaggcagcctccatcctcacaccccttatcacatccgcgtggcatgcaccagcagccagggcccctcatcctggacccactggcttcctgtggagacgccggagggaggtaagaagggttggggagggacacgtcaccactgccccaccggaccttgcttatatcagtgccacccccattgtcccctttcactcctttacccctcatggcctcaatctccttcccatccaatctctgacccctcagcagcactgcccgctggcctctctcccagcccttctctcccctgtgcttcctctcatgggaggcctgcacgagttgcccacgtgtgtgcccttggcaccctgcacccacttcctgggaacaggggagggggtcaggaagaggtgggggtgccagcttcccctcttccctgtcctccagtgcccctgggcccccctgagaacattagtgctacgcggaatgggagccaggccttcgtgcattggcaagagccccgggcgcccctgcagggtaccctgttagggtaccggctggcgtatcaaggccaggacaccccagaggtgggtgctgctggtgggattggagtggagtggcttggggaggagggaggagaacatatcagggcagacatagatggttgtgaaggttgggtagtacacaattgctctatgcctagggggcacattcagggaaggttcacattcacattctggggagaataagggggtctaagggagggcatggggaatggctgtttttgaaccactgcaaaagcatttcagcagactcatatttactatataacgattttacagcagatagttatatagcaccttggggaaggggtaccttttcctgattttcacaaaggcactcctatcagggctagcaataccctgacatagggagggaggatggaaagggaagctagaaggggatggagggatacaggttaaaggatgaggatgagagatgaaggggaggacgaggaaggatgaggagttggaggatggggagagcgttttgagaaagagatggggcattgagcccgagagtgaaggcttaacagctggggggtaaggttctaccctgatgccacttctggacctcctaggtgctaatggacatagggctaaggcaagaggtgaccctggagctgcagggggacgggtctgtgtccaatctgacagtgtgtgtggcagcctacactgctgctggggatggaccctggagcctcccagtacccctggaggcctggcgcccaggtaagtccaaagccatgcccaacctgcttcaaccctgtctctccctgacagccctgacttactccttgtacctttcagtgttaccgcaacttaggccctgttcctaccctgagccttactgagagctgccctcactcccttacccatgccaacccctcactcccttacctgtgccacggcctcactcctttacccgtgccacaccctcactcccttacccgtgccacaccctcactcccttacccgtgccaaaccttcactcccttactcgtgccacaccctcactcccttacccgtgccacacccttactcccttacccgtgccacgccagtcttgtcctctctgagcacatctcctctctgtcctttcttctcacagggcaagcacagccagtccaccagctgggtaagggcttccacaccccatctcctccttccctaccctcaacacctagtgggggcactgtcaccatgcatactcattgcacatccctttcatgtttctctaactcatcactctaacctacttcttgagtttgtgtggtccttgatggaggtgcctataatggcctagcatagcacattgtaggtattcaggcaatgacagatgagtgggtggatggatgaacaaatagatggatggatggatggatagatatatggagggtggatgggtgggtgggtcaatggatgaatagaggatggataggcgggtgaacagataaatgactggatgtcgagtggataaatggatgggtagatggatgggtggatggatggatgggtggatatatggagaatggatgggtgtgtgggccaatggatgaatagagggtggataggtgggtgaacagataaatgactggatggtgagtggataaatggatgggtagatggatgggtggatggatgggtgggtggatatatggagggtggatggatggatggttggatatatggagggtggatgggtgggtgggtcaatggattaatagatgggtggataggtggatgaacaaaagatgactgggtggtgagtggatatatggatgggtagatgggtggatggatggatggatggatggatgaatggatggttggataaatggatggatggacagatggatggatttgtgagtggatgaatggatgggtagaaaggtggatggatggatgaatgaggtatcctcctcacatccatccctctcaaatatttctctaacaattctcaaacattcctcctacacccattgtcccctctgggcactattatggttcactcttgtaactcaacccactagccttcaatactccttacatcccttcctacatttcttcacatacgctttccacgcttattccaccctcctttcacatatatcccattataatccgttcctcccacatgaccccaaaggcccattgcacaacacacttctcattcacaaactctgcacaccttgtatgcacttaccataccttccacattgcaaacactgaaaaacattgtccacaactttcccacacccgattctccttgcatgcttactgcacactccatagacatcattccctcacccttcactaatcccaacccatctcactctgcacactcaccctgaaccccttgcatactcagcacataatgatctttatttcttacacactccattccacccctgccctttttacaccccctttctgtgcaccccatacttctcatctgcccttctaacatcttttgcatgctcactgcacacttctctcacactgcaattacatccttaaaattccttgctcactccttgtatctaagacttcacgaatactcttcccacttcacacacccccaacttttccagcagccatccaaccctgtatatgcttaccatgcccctttggatatttatttcaccctcattcctggctttatggaaaccattgtggccgggtgcaatggctcacgcctgtaatcccagtactttgggaggcctgagacaggtggatcacctgaggtcaggagttcaagaccagcctggccaacattggcgaaaacccatctctactaaaaatacaaaaattagctgggcctggtggtgcgagcctgtaatcccagctgctcgggaggctgaggcacaagaattgcttgaacctgggaggcggaggttacagtgagccaagatcatgccactatactccagcctgggcaacacagcaagactctgtctcaaaaaaaaaaaaaaaagaaagaaagaaagaaaaaaagaaagaaaagaaaaagaaaagaaaaaaaaattagccaggtggcacagacctgcagtcccagctactcaggagacatggtgaaaccctgtctctaccaaaaaaagaatacaaaaattagctgggcatggtggtgcacacctgtaatcccagctacttagaagctgaggcaggagatttgcttgaaactgggaggcagaggttgcaatgagctgagaccgggccactgcactccagcctgggtgaaagagtgagaccctgtctcaaaaaacaaacaaacaaaaaaagagacaaagaaaacccttttgtagtcattgcattctcttcaaaagatgttccttagtccgccctccttgcacacgcttcatgcaccatcctacactgcaaggatcttcttccccactcacctgcttatctacactctagtccacccttcttgcacaatcatcacatttctcacactaacctatgctgcttgagatttctccacacccatctcatgttcatctagccctcttggcacactcataacgcgttccacacatctctccctcccattccacactcactgcacactcctcaaatatccattccactcttctgtttttttggatcttggtggcataatatttggtagcttaaagtaaggaaaactgcaaacgcccaaacagggacttgaaccctgaaccctcaggttaaaagtctgatgctctaccacctgaactatcctggcactctcttttttttttttttttttttttgagatggagtcttgctctgtcacccaggatggagtgcagtggcccagtctcggctcactgaaacctccacctcccaggttcaagcaattctcctgcctcagctcccgagtagctgggattgcaggtgtgcaccaccaccccagctaatttttgtatatattttgtttaagtagagacagggtttcatcatgtcggccgggctggtcttgaactccttgcctcaagtaacccacccgccttggcctcccaaagtgctgggataacaggcatgagccaccacacctggcctccatcccactcttaactcacccatcctacaactttcacacacttctgctttaacctgcacttgtatcacatccattgcatgccctgtccagcccagcccattcagatatgtgaatgcatccatcacacacctcatcaagtatgtgcacatctttgccgaggccttctgcctccctcccacatcacccctttgggtcccagagagctggatccaaggcctcatccatgacctgttcctcataccccctgatagtgaaggaaccttcaactcctgccttctcgtggccctggtggtatgtactgctaggagcagtcgtggccgctgcctgtgtcctcatcttggctctcttccttgtccaccggcgaaagaaggagacccgttatgggtgagttggaaccacatggggaggctgtgtggcctgggatggagaggctggaggcagggaggccagtgaggaggctggtgcaggaggagtgatgactaagaatcagaatgagggcaagggaagccaggcgtggtggctcacgcctgtaatcccagcactttgggaggctgaagcaggtggatcacttgaggtcaggagtttgagaccagcctggccaacatggcgaaaccctgtctctactgaaaaatgcaaaaattagcgggaagtgtaggcacacgcctgtggtcccagctacttgggaggctgaggcacgataatcacttgaacccgggagatggaggctacagtgagctgagatcgcatcactgcactccagcctgggtgacagagtgagatcctgttttcaaaaaaaagaatgagggcaagggggtgtgtggaatgaatggaaggcagaaggtagctgcccaaggcatgctcagcaaatgttagcacagagggcaggcagggcttgaggctgagatggtgcttgctcaactgctggttgagtagggggttccacatggtttttccctgccctcacctactccccctcccccccagagaagtgtttgaaccaacagtggaaagaggtgaactggtagtcaggtaccgcgtgcgcaagtcctacagtcgtcggaccactgaagctacctgtaagtgaaccctatgccccactgccctggcctggatctaaaggctgtagagaatctggcctgctgggcttctgtacatgtgtgagccaaaagtttctaaaggccttgggatactagaatgtcagaaccacagaccctagaaataacagatttgtggaaccacaaagaactttcaaggaatagaatcttagacacagtaaatcttagaaacaccaaggctgggtgtggtggctcatgcctgtaatcctagcgcttcggggggccgaggtgggaggatcacttgagcccaggagttcgagaacagcctgggcagcatggtgaaaccctgtctctacaaaaaaaaaaaattagccaggtatggtggtgtgcccctgtactccctgctactcgggaggctgaggtaggaggatcacctgagcccagggaggtcaaggctgcagtaagccgtgatcacaccactgcactccagcctgggtgacagagcaagaccctgtctcaaaaaagaaaaaaaaataaaagaaagaaaagaaacaccaaacctcagagccattggatcttagaagatgtaatgatgatgataatgatgaagataatgacaagaagaaaatgatgatgatgatgaaataatgttgagattagatggtgatgatgtgataaaaatcacaggcaaccctagcactacctatgtggcaggctctgttctaagcattctacatgtatctcctcgtttaaccctcagagcaacccaaggacacgggtttcttttttctttttttttctttttttttttgagacagagtctcgctctgttgcccaggctggagcacagtggcacaatctcagctcactgcaaccttcacctcccaggttcaagtgattcttatgcctcggcctcccgaatagctgggattacaagtgcatggcaccacatctggctaatttttgcatttttagtaaagatggggttttactaaccctgtctttgttagccaggctggtcttggaactcctggcctcaagtgatcaacctgccttggcctcccaaagtgctgggataacaggcgtgagccaccacgcccagccagaggtgggtttcttatcaccttcacttcacagatgaggaagctgtggcatagagtggttaagtcacttgcccaaggccacacagcttgtaaattggatagctgggatttgaacccaggtacttttgctctgaagtctatactatttttttttttttttgatagaatcttgctctgtcacccaggatggagtgcagtggcttgatcttggctcactgcaacctccgcctcctggattcaagcgactctcctgcttcagcctctcaagtagctgggactacaggcacatgccacaacgcctggctaatttttgtagttttaatagagacaaggtttcaccatattggccaggctggtctcgacctcctgaacccgtgcctcccaaagtgctgggattacaggtgtgagccaccacgcctggcctgaagtctatactctgaactgccacactctactacctcttggaattataaattggtagagagatagaatcgatcttggcctgaaaaattatatgcatgtactctacacccttatacttttgaaatcataaaatcttagaactatagactctccattagaaggctggaaagccatgcaaggtctcagccgaggaggggatctcagaggcccagtcaaatctgttctttcggctgggtgcagtggctcacgcctgtaatctcaacactttgggaggcccaggcgggcagacacttgaggtcaggagttcgagaccagcctggccaacatggcgagaccctgtctctactaaaaatacaaaaattagccagatgtaatctgtaatcccagctacttgggaggctgaggcaggagaatctcttgaacctgggaggcggaggttgcagtgagccgagatcgtgccactgcacttcagcctgggtgatagagcaagacaccgtctcaaaaaaaaaaaaaaaaaaaaggaatctcatctttccagttagggaaactgaaatccagaaagaaaatggaagagctaggtctcttcctagcatacagcgagaaagccgccagggccccagggggatgtttggaaagggctgggaaagacatttatttaagaagagaaggaagaagcaacgatgtcccagtgatttaactgagtaacatacagcatccattctcagggtgtgagcctggtcccctgtggtccctgagacctttgcagggggcccataaggtcaaatctattttcatactattaccaagacattatttgcccttttgctttctcattctctcattagcattcagcgcagttttccagaggctccctgacgtgggatgatgtcatccaacactctgacagctgatggaccttgtgcttgtatattcttgttttaaaaatttatcaggctgggcatagtggcacatgcctgtaatcccaccactttgggaggccaaggtgggaaaattgcttgaggtcaggagtttgagaccagcctgaccaacatggtgaaaccccatttctactaaaatacaaaaattagctgggtgtggtggtgcatgcctgtaatcctagctacttgggaggctgaggaaagagaatcgcttgaacccgggaggcggatgttgcagcaagctgaggttgtaccactggacttcagcctgggcaacagagtgagactgtctcaaaaaaaaaaaaaattaaataaacctgataggttttcttttgaggccaggagtttgaaaccagtgtgggcaacatggcaaaaccccatctctatttaaaaaaaaaaaaagaaacacaaaaatttgccaggtgtggtggtgtacacctataattccagctgctcaggagggtgaggcaggggaatcacttgaacctgggaggcggaagttgcagtgagctgagattatgctactgcactctagcctaggcaacagagcgagactcggtttcaaaaaaaatttttttctttttttagagatggggtctggctatgttgcccaggctgatctccaactccaggcctcaactggtcctccttccttggcctcccaagttgctgggattacaagcgtgaaccactgtgcccagctagttttatttttgaatacagaaatattgatatatatgtaacataaacaaaagctctttctagtcctcaataattctaacaatgtaaaggtgtcctgatgtcaatttgtttgagaatgattatataacaaagaaaatggataaattacaattacactcaacaacaactaaattaaaactatttcatagacatcatgttgagtgaaagaagccagacacaaaagagaatatactatgtgattccatttttataatatttcaaaactaatcgattgtaacagaaatcaagaaagtggctaccccaggagggcaggtcatgttctgttcttggcctgagtgctagttacacatttgtgtttgatttgtgaaaatccactgagttggccaggcgtggtggctcacgcttgtaatcccaacactttgggaggccaaggtgggcagatcacctgaggtcgggagttccagaccagcctgaccaacatggagaaaccccgtctctactaaaaatacaaaattagctgggcgtagtggcacatgcctgtacttgggaggctgaggcaggagaatcgcttgaacctgagaggcggaggttgcggtgagccgagattgcgccatcgcactccagcctgggcaacaggaacgaaactccatctcaaaaaaaaaaagaaaagaaaatccactgagttgcttacttatgatttgtgcagattatacttcaataaaaagaaatatttttgtgtgtgtgttttgtttgagatggggtcttgctctgtcacccaggctggggtgcagtggcatgagctcagcttactgcagcctccacccctgggctcaagtgatcctccaacctcagcctcctgagtagctgggactataggcacgtaccaccacacatggctagcttttgtatttttttgtagagacggggattcgccatgttgcccaggctggttttgaattcctggactcaagtgatccaccggcctctgcctcccaaagtgctgcgattacaggcatgagccactgcgtccagcaaaaagaaatatttttattttattttattttattttattttattttatttttgagacggagtcttgccctgtcacccaggctggagtgaagtggtgcgatctcagctcattgcaacctctgtctcttgggttcaagtgattttcctgcctcagcctccccagtagctgggactacaggcatgtgccaccacacacggctaatttttgtatttttttgtagagacagagattcgccatgttgcccaggctggtcttgaactcctggactcaagtgatccacctgcctctgcctcccagagtgctgggattacaggcgtaagccactgtgcccagcaaaagaaatatttttaacaactggtacagcagggcactgacccatcagggtgcccactggagcaagagcgtggccaggctttacccctttagttccctttgagggaaggttcagggggtccagaggaggagctggggtggaagtagaggggtgctcagggcagttgctaattttaaatcagtgcagaagtatgtcagtgtttcaacaatggatctatccctactggtgggtgaatgtcacctgaatgtcagccctgctccatgactctgtccaccccaaccttgcatgcagtgaacagcctgggcatcagtgaagagctgaaggagaagctgcgggatgtgatggtggaccggcacaaggtggccctggggaagactctgggagagggtgagtcccccggcagcatacacacatccttctgaacttctgagatcctgcacttccacactcccacccaactataggaaatacagtccccacgggccctctgaggtcagtgtctccctctggccccccacaggagagtttggagctgtgatggaaggccagctcaaccaggacgactccatcctcaaggtggctgtgaagacgatgaagagtgagttacgtgcacatgtgtaggacccccagctccttccctatgcccctgagacagaagagagcaagcaagttagccatagcttagaacttctggtgtttccagataggcaatggagcccctgccaggtacctcaatagaaggaattgaatatggggagattagtacaaaggtgggagacgggttgaaggaacaactgggggcagggagggaaaccagagatgagcagcagcaggaagtcacttcccccgctaggcctgaagggtagagggagcaagtggtgttaccagaatccacagctagggacaccaggcaggagctggtatcacagagttagaggctgctctgtgggagctaaaaacccagaatagcactttgggaggccgaggcagcagatcgcttgagtccaggagtttgagaccagcctaggcaatatggtgaaaccacatgtctatgaaaaaaaaaataataatagtaacaaaaaattagctgggcatggtggcacacgcctggagtcccagctacttgggacactgaggtgggagaatcacttgagtctgtgcggcagaggttgcagtcagctatgatcatgccactgcactccaatctgggtgacagagtgagactttgtcttaaaaaaataaaacacacatggctgggcgtggtggctcacgtctgtaatcccagcactttgggaggccaaggcgggtggatcacatgaggtcaggagttcgagactggcctgatctgcatagcgaaaccccacctctactaaaaatacaaaaattagccaggcgtggtggcaggcacctgtaatcccagctactcgggaggctgaggcaggagaatcgcttgaacctcacaggcggagattgcagtgagccgagatcgtgccactgccctccagcctgggcgacagagcaagactccgtctgaaaaaaaaaaaaaattaaaacacacacacgcacacatgggcgacacaaccaccaccaagggaataccagaagcagagagagggtgaaataccctggcttctccctttctccccgctacctgccagtctcccataagggcctacctcccattggcaaatcccaagaggaaaccactaggaaagggagcctgggaaatgtagttttcaggggccggcccactgtgatacatagtggagcaggagaagctctagaatgaggcatacctggctgaatcatttaccagctatgcgatctcaggcaaatgactttccctctctgagcctcccacctgtcatctggaaaaaaggaccctaatgtccccaccttccaaagctgttttgaggcaaagcacttcatgctgagggtggcaagtaggacatgcttgttaatgtggagtaggactatattatttccattatcagagagggcaggagccatttcagggttacacagcacaggaagtccagggctaagttcttcacacacagggaaggagaagcatagggcattcagattggggctggtggtgaatagagaatgatcctttctgaattacagggcttaaaagcttgggctatgaagtcattacccactcattcgttcattatggagcacctcctgtgtaccaggttattttgtttgttttgctctgttttgttttgttttgaggaggagtctcactctgctgtccaggctggagtgcagtggcatgacctcagctaactactacctctgcctcccaggttcaagcgattcttctgcctcagcctcctgagtaactgggactacaggtgtgcgccaccacgcccagctaatttttgtgtttttagtagagacggggtttcaccatgttggccaggatggtctctatctcttgacctcatgatccacctgcctcggcatcccaaagtgctgggattacaggtgtgagccaccacacccagcctacgttttttgttttttgagacagagtcttgctcgttgcccatgctggagagcagtggcaggatcacagctcactgtagtctcaacctctgaggctcaagcgatcctccccactcagcctcccactggttatagtcttggcctgggtctgaatctcagccgtgcaaccttgggcaagtcattttgcctctgtgagccacagtgtcctgaactgttaaatgggatgatacttgtttgggtccccagggcaggtagggaagtgctgggaagcagcctgggcagttgtgagcaggtggaccctggagccagactgcccgggtttgagatctgcctcttccacctccaagctgtgtgttcccttaggcagactcctaacctttttgtgccttgctttcttcatctttaaaatagagataggccagggacagtggctcatgcctgtaatcccagtgctttgggaggccgaggtgggaggatcacttgaggctgggagtttgagaccagcctggacaacatagcaagactccctctcaaaaaattggctgggcatggtggctcacacttgaaatcctagcactttgggaggccaaggcaggcagatcacttgaggtggggagtttgagaccagcctggccaacatggtgaaaccccgtttctactaaaaatacaaaaattagctgggcatggtggtgcatgcctgtaatcccagctactcgggaggctgaggtacgagaatctcttgaactggggaggcagaggttgcagtgagccaagattgcgccattgcactcaagcctggaggacaagggcgaaactccatctcaaaaaaaaaaaaaaaattatccgggatggtggtgcgtgcctgtggtcccagctactcaggaaggcaagcctaggagttcgagcctaacctccagtgagctatgtttgctgtgattgcatccatcctgggtgacagtgcaagaccctgtctcaaaaaataaaaataaaaaacaaaaacaaaaacaaaacaaaacaaaacaaaaaaccaataaaatgggaatgataatagtagcacctgagaagattaaatgagttaatatatataaagttggccaagcgcagtggctgacgcctgtaatcctagcactttgggaggccgaggcgggcagatcgtgaggtcaggagatcgaaaccatcctggctaacaaggtgaaaccccgtctctactaaaaatacaaaaaattagccgggtgtggtggcacacgcctgtagtcccagctactcaggaggctgaggcaggagaattgcttgaacccgagaggcggaggttgcagtgacccgagatcaaaccactgcactccagcctggacaacagagtgagactccatctaaaaaaaaaaaaaaaaagaaaatatatattttatatatatatatatattatatacacacacacagacacacacacatacacatatcacatataaagtgctgagtatggtgcctggtacttactaatcatgtttgatgaagatgagtgatgatgatgatgatgatgatgatggagtggaggtggagggagagtcctccctctcctcccctcctcctcacgacctttctctctccctcaagttgccatctgcacgaggtcagagctggaggatttcctgagtgaagcggtctgcatgaaggaatttgaccatcccaacgtcatgaggctcatcggtgagagaggggcagattcaaggggtctacaagccccatgggggccatagcagagggaagagccctgcttctggccctgggaagatcaaacttccaggcttcctgctccccgctccttcagggtcagcaggcttccccctcctagtctccctcagcttggaatgtgacctctgatcattcccagaaatagctgaggtccccaggagggctccggaaacgtccctgggaactctgctggaaacagcttctctgcagcttggtccttgccactgccactacccccaaacaatatggtggccagattggatgggtagtgagaaggagaggctggaggctggctggtggggggcttggcttccccttctgcccagcaggagtgacagggctacctggggggctcaggtgtctgtttccagggttctgaacgagagagcttcccagcacctgtggtcatcttacctttcatgaaacatggagacctacacagcttcctcctctattcccggctcggggaccagccagtggtaaggggcgtttaatcattcagtctacaaatattaactgagcatctatcaggtacccagtgctgctcagaccctgggaagaccacggtgaccaggagcttgctctcctggagcatttcttccagcaggggaggggcggatgataaacaagctaataaatacctaagcgagatgatttaaatgtttaagtgctaggaaggaaatacagtaggatggaagataaggaggccaggcagtgaatttgggtggacgtggaagatcttgccgaggaggtgaccgtgaaggagttggggctggggagatgtctggagatctgggcaggaagcgaccccaacagagcgcacagcataggcaaaggctcggaggtgggaatgatcatcgtttgtctgaagaccagacaggagtctggtgggagtgtcagtcaagggcaagaacataggcaatcaagtccaagaggaaggctggagcaagtttataggaccttgcaggccatggagaggggttgggttgaattgtcagggccatgggaaaccactgcgggcagagctaggcttgcacagagggatggagggaggagggatcgcatcaaggactctgttgacctctcctcccacctgccttggctccccagtacctgcccactcagatgctagtgaagttcatggcagacatcgccagtggcatggagtatctgagtaccaagagattcatacaccgggacctggcggccaggaactgcatgtgagtgcctttcagggacccccccccaactgctcctgcactccctgagggagttccctccctccttcttaggatggaagcagggctagacacccgctgagggcaggtcagaactcaggaccaggaaagtcagtaagggggtctgggaaggcttcctggaggaggtgagtcctgaactgagatctggaaggagcatttggatgcggagagggaagagaccagaaggtgggctcagtgcacagcatgaggtgagcaaaggggctgaggtgaccgatgggggtggggacacgtgagctgcatctctgtcccactccatgctgggtgtcttgcctggggctgccctttggaagcggccacactggataagaaaatcaaactccccaccaatggacaagcagaaaatatgccagatggggtgcagtggctcacgcctgtaatcccagcactttgggagtccgaggcgggtggatcacttgaggccaggagttcgagaccagccttggtgaaaccccctgtctactaaaagtacaaaattcagcctggtgcggtggtgtgcgcctgtaatcccaacacgagaattgcttgaacccaggaggcggaggttgcaatgagccgagatcgcatcactgcactccagcctgggcgacagagcaagactctgtctcaaaaaaaaaaaaaaaaagaaagaaagaaagaaagaaagaaaaaagaaaatagtaacctgtagtcccagccattcccaaggcttaggtgagaggattgcttgagcctcgagaccagcctgggtaacaacaacgagacaccatctcaaaaaaaaagaaaaaaagaaaagaaagaacaaaaaatcccccaaaagccagaatagagggtaaggggagggtagaaggtggagggaatggaaccacagagttagaatattagtcttggccaggcgcagtggctcacatctataatcccagccctttgggaggctgaggcaggaggatcacttgtacccaggagttcaagaccagcctgggcaacatagtgaatcctgtctttacaaaaaataaattagctgggcatggtggtgtatacctgtggttccagctacttgggaggctgaggtggaaggattgctagagcccaggaggttgaggctgaagtcagccatgatggtatcacttcactactgcctgggcaacagggcaagatcccatctaaaaaaaaattgatgtatattttacatacactaaaatatacacatgcagctcagctcgatgaatttttatgggtatagacccatgtaaccactagatgaaggtaaagaatatttcttagccccagcaggctccttcatgcctcttcgtcttcccaatcactaccgccaagtggtacccactatcctgacttctcagtgctagtttagcctgttctgaaaagtcatacaaatgggatcatgcagtttgtactgctttgtgtctggcttctatggctcagcatgatgtttttgagatggatctgtgtaggggtagtttgctctttttctttgctgtgtggtatggtattccatcatatgaatgtcctgtggattttcttttctttttttctctttctttctttttctttcttttctttctttttctctctgtcctttcttctttcttttctttctctttctctctctttatctccttccttccttccttccctccctccctctctctttccctttctttccctttttttctttcttttcttttttgttttgacagagtcttactctgtcctttagggtggggtgcagtggcatgatcatagctcactgtagcctccaactcctggctcaagctatccttctgcctcagcctcctaagtagctggaactacagacatgtgccaccatgtccagctaatttttaaatttttttgtagagacagggtcttgctttgttttccaggctggtcttgaactcctagcctcaagtgatcctcccaccttggcctcccaaggtgctgaaattacaggcttgagccactgtgcctgtttttttttttgtttgtttttgagacggagtctcactcactctgttgcccaggctggagtgcagtggcgtgatctcagctcactgcaacctccgcctactgggttcaactgattctcttgcttcagcctcccaggtagctgggatttcagatgtgcaccaacacacctggctaatttttgtacttttagtagagacagagtttcaccacattggccaggctggtctcaaactcctgacctcaagtgatccacctgccttggcctcccagagtgctgggattacaggcgccagccaccatgcccagccatgttctgtttcttaatctgggtgctggttacatgggtgtgtgtgtgtgtgtgtgtgaaaattcagtgagctgcttacttatgacttgtgcacatttccatatgtacagtatacttcaagaaaaaaaaatttcatcaaggaatcaaacccaaggaaggaccttagaatctagcaaagagccaaaattgggaagtcctgaggaagccctttgtcccatcctcacttgacagagtgaacaagaagtaaagcagttcccttctggactgggatgaaggtttaggagacagatccccacccgcagccaggacagtgaggggaggaggtgcagatgtgtctgagagccagggcaggcttcctggtggaggtgactgatgccctgaccctgttcctttccccaatccaaacaggctgaatgagaacatgtccgtgtgtgtggcggacttcgggctctccaagaagatctacaatggggactactaccgccagggacgtatcgccaagatgccagtcaagtggattgccattgagagtctagctgaccgtgtctacaccagcaagagcgatgtggtaggtgcactcccgccaagagtggggaaccatgggagggcatggcctgaccatcacacactatgcctgggtggctgtggatgcaagggtcacagggacatgtgggcttccctttgcaggggcttgtccacatgggctgggcatgtcttggggtatggtgggcatctctgaatagtggtgtgtacatgcccaggataaatacaggcccacgtgtgcatggtagcaatgtagacagtttaggttagaagaagctgcagtgattatgcgtgcatgtgcgcacactcatagaatgtggacagccagggtgtgcagagtggcacatgagctcatgtgtccatgaagtgtgtatatgtgtgtgatggtgagcatgtgtatgcatccacaaaagttacttattcatgtgtatacccgtgtcaagtattttttatatatatatatttttctttttttgagatggagtctcgcactgtcacccaggctgcagtgcaatggcatgatctcagctcactgcagactctgcctcccgggttcaagcaattctcctgcctcagtctcccgagtagctgggattacaggcgcccaccaccatgcctagctaatttttgtatttttagtagagacggggtttcactatattggccaggctggtctcaaactcctgacctcaggcagtccgcccacctcagcctcccaaagtgctgggattacaggcatcagccaccgcacccggctaaagtattatgtttctatgaatacttgtgatgctcccagaggatggttgtgaacatgtgtacataagtgtgggtgtacccatgaacctgggtattggtgcgggtgattctgtgcaggagagactgtctaattccctctgcccctcacagtggtccttcggggtgacaatgtgggagattgccacaagaggccaaaccccatatccgggcgtggagaacagcgagatttatgactatctgcgccagggaaatcgcctgaagcagcctgcggactgtctggatggactgtgaggacccttaggtctcccccaacccagaattcattccaaacccctgactacccccagatggccctcacaggtccaggactctctataacccagacagaatccctgagaatgctgagtgacccacttgcccctcaccaatgctctgagtagggccatcactaaccagtggggtgcaaatcagctaaaggcaccctttcctcctttgtctgtgtgggctgaatcagccccctggctccccacccccaagccaggtatccttgggtagtgaataacagcacagtcttacctggcggccctgcctttgggacatgcactcccagagacttctcattccagactcctgagcacaccatgcttccccgacatgctcctcaacacctgagactctctgcaaaacccttcagtttgttttattggccttctccagactcaggtctcctctgagatatttgcaggatccttcagggaatgcttaccaaactttgcaatattggagtatgcggagaaggccgtgacatttagctagcactttgagggtaaagagaggatgactttgggtcaggaggagacagcctggggcgtcagactcctcagtccaccttgggtactccaagagctgagacgagtaaaaataacagctaacattttcatataactgactagaaggcactgttttaggtgcctggcatgtgtcaaatcatttggtccttaccacagccatgtgatgtagataggtatcattatgattcccattctgcagataagaaaacccagtcctacagggagggtaatttatttttatttattgacttgagtctcgctctgtcgcccaggctggagcacaatggctccatctcggctcactgcaacctcccaggttctagcgattctcttgcctcagcctcccaagtagctgggactacaggcgtgtgccaccatgcccagctaattttttttgtatttttagtagagatggggtttcaccaccttagccaggatggtcttgatatcgtgacctcatgatccacccgtcccagcctcccaaagtgctgggattataggcatgagcctccacgcccagtctgggagggtgatttatttgccaaagattgcacagctggtgtgtttgttatctatatccccaaatcaagtagtttaaaacaacaaacgtttattatctcacacaatttctgaaagttggatactgggaacagcttagcagggtgattttggttcaggatctctaatgaagttacaaagatatcactgggggctgcagtcatctgaaggttgggactggaggattgctttcaaggtggcttactcacatggctgtagcaggaggcttcagttcgttgccatgtggacccctttgtggcactgcttgagcttactcacaacatggcaacccaggagaaagtgcgaggaagccacatgccttttatgacctagtctcagaagtcacacacaccatcacttctgccaaatcagaagcaagtcactaagtcctgcccatgctcaagaggagaggatttattctccgtcttttgcagggaggagggtcaaagaatttatggacctattttaaaccagcacagcttgtaagtggcatagccaggctttgatgcaagtctgttctggggagctggaaggtctgttctagcaaaccctcatcagaatactactccatatacagacaggtttcccgagacccttcccagctcctgagtctcccaggacccaactcagaaattcttgggaattcccaaatccccatagatggcctcaaactgctgaggctccctataaccctctaaaatgcccccagtcccctgagtgtcctaaaatgtccccaggcttccagaatgcaccccttctgagtccctgctcaatctcccacccctcattttgctgccctaggtatgccttgatgtcgcggtgctgggagctaaatccccaggaccggccaagttttacagagctgcgggaagatttggagaacacactgaaggccttgcctcctgcccaggagcctgacgaaatcctctatgtcaacatggatgagggtggaggttatcctgaaccccctggagctgcaggaggagctgaccccccaacccagccagaccctaaggattcctgtagctgcctcactgcggctgaggtccatcctgctggacgctatgtcctctgcccttccacaacccctagccccgctcagcctgctgataggggctccccagcagccccagggcaggaggatggtgcctgagacaaccctccacctggtactccctctcaggatccaagctaagcactgccactggggaaaactccaccttcccactttcccaccccacgccttatccccacttgcagccctgtcttcctacctatcccacctccatcccagacaggtccctccccttctctgtgcagtagcatcaccttgaaagcagtagcatcaccatctgtaaaaggaaggggttggattgcaatatctgaagccctcccaggtgttaacattccaagactctagagtccaaggtttaaagagtctagattcaaaggttctaggtttcaaagatgctgtgagtctttggttctaaggacctgaaattccaaagtctctaattctattaaagtgctaaggttctaaggcctactttttttttttttttttttttttttttttttgcgatagagtctcactgtgtcacccaggctggagtgcagtggtgcaatctcgcctcactgcaaccttcacctaccgagttcaagtgattttcctgccttggcctcccaagtagctgggattacaggtgtgtgccaccacacccggctaatttttatatttttagtagagacagggtttcaccatgttggccaggctggtctaaaactcctgacctcaagtgatctgcccacctcagcctcccaaagtgctgagattacaggcatgagccactgcactcaaccttaagacctactgttctaaagctctgacattatgtggttttagattttctggttctaacatttttgataaagcctcaaggttttaggttctaaagttctaagattctgattttaggagctaaggctctatgagtctagatgtttattcttctagagttcagagtccttaaaatgtaagattatagattctaaagattctatagttctagacatggaggttctaaggcctaggattctaaaatgtgatgttctaaggctctgagagtctagattctctggctgtaaggctctagatcataaggcttcaaaatgttatcttctcaagttctaagattctaatgatgatcaattatagtttctgaggctttatgataatagattctcttgtataagatcctagatcctaagggtcgaaagctctagaatctgcaattcaaaagttccaagagtctaaagatggagtttctaaggtccggtgttctaagatgtgatattctaagacttactctaagatcttagattctctgtgtctaagattctagatcagatgctccaagattctagatgattaaataagattctaacggtctgttctgtttcaaggcactctagattccattggtccaagattccggatcctaagcatctaagttataagactctcacactcagttgtgactaactagacaccaaagttctaataatttctaatgttggacacctttaggttctttgctgcattctgcctctctaggaccatggttaagagtccaagaatccacatttctaaaatcttatagttctaggcactgtagttctaagactcaaatgttctaagtttctaagattctaaaggtccacaggtctagactattaggtgcaatttcaaggttctaaccctatactgtagtattctttggggtgcccctctccttcttagctatcattgcttcctcctccccaactgtgggggtgtgcccccttcaagcctgtgcaatgcattagggatgcctcctttcccgcaggggatggacgatctcccacctttcgggccatgttgcccccgtgagccaatccctcaccttctgagtacagagtgtggactctggtgcctccagaggggctcaggtcacataaaactttgtatatcaacgagcttctgtctcctcttgtctccttttagctgtgatgtggccccattccctggcaattcagttcccccatcagaaaaaagaagggcttggtagggtcttggaattctgtcctcattagagagggtagaaatgaacacacagatagacaaaaagacatacaagcaaagagatgcaggttctcagaaacccccagtgaggaactggcatacagatccaggatcacagacacacacacacacacacacacacacctgttccgccgcaaactaacagacacatgaattaatggacacacccaggaggacctggtcacaaatacagagactgaaactcagacgcatagagtaacacagacacacagaattacacagacacaagcatatttacaaacatgctcaggcagatacccgccacgaataggaagagacacagacctagagtcaagtgacacaaatactcaagagacatgtagagtacaacaggtactcacaaccccgaacgttcagactgacatagaaacacaggcacagaacacctccgatcatcacggacccacaaagggcctccagcgaagaccagcccaccgtgtctggcacgcactcgcgagcgggcgttcgcgggtgtggccggcagcaaatggagaaacccttggcagcgcccggacgccctccagtggcggctcctgagaaccggggacagttcaatccgggccacaaacttttttagaacaaatcattgtgggaagctgggaggagagagagagagaggaagtcggacgtgggcgaggggcggggtgtctggactggaacctctgggcccacgtgagtgtctgtcccgctgctgagtgggtgctgtgtgtttgggttgctgtagtgttcgcttgtagtgcaactatcctgtgttatctttattattcgatgccgcctgcctctgcggaccgtagtgggcacatctacactgcagcggggtgccttacccaaagcagatcggaattggggccgggcgcggtggctcacgcctgtaatcccagcactttgggaggccgaggcgggcggatcacttgaggtcaggagttcgagaccagcctggccaacatggtgaaaccccgtctctactaaaaatacaaaaattagtcgggcatggtggcggggacctgtaatcccagctactcggaaggctgaggcaggagaatcgcttgaacacgggaggcggaggttgcggtgagctgagatagaggccctgcactccagccagggtaacaagagcgagactccgtctcaaaaaaaaaaaaaaaaaaaaaagaacaacaaaaaaaagaactggatgcgtctgatctgacgcacgcctgtttgtttacgactgcggggtgtgcctttgtctgagtagagatagtgtgtggcttttgcgggcttaacgtgtggctcaggaggcagtgggagtctgcatcatgtatcccgattgcgtcttactcgagttttgttttgagttagaggcgacaggtggtgcagcgttagacactgggaagctctgtggcttttgtattcctgagcgcgaaggttaatgacggatccgtggggttgagcttgtcggtacagacgccagacagcccgatttacgggaacagccgattagaggattcgggagagcggtcggtgaacttctggatgtctttcgggaggggaaggctctatggtcgcgtgcagagcgcccgttccacgtcaggtacccgaccatagagcaaggcggccgcggactacccaagggaaggggaggccgtgtcctttacaacttgcctcccgttgttagtctagtttctatagccaaaccttcgggactctctcaactcaaaattttgcttttcctaaaggcaactgggttccttccagattacgaactgtgtatccacttaatctctatttcgtatacctcctcctacagcgaaatttgtgaggcagtcctctgaagcacggccaatctggtgaacttttcctaaaatgagccatcgctaccagctttagtgagctaagacaataactgcgattggtgggcagattgttttgaaaccgccctaacggcaaggggcgggctcctggtgaattcatctctttccggtttcttaaaggcaacaggaaggaggggtttctgccgaccctccatttgattggttctagtggttttacccgctcggactcctcaaggggcgggagatgtacaccaatcggaatgtgtgttacagagacacttagtttgatgaaaggactgcgcaggaaaggccgtgggacactcattctgagatcttaccgttgattggaccaaattgttactcccttattttcattggaccttacggcagccggcgcgcgagagttacccaatcagcaagcgctccgcctcctgccttttcccgccctccgctccggcctcggcttcgacgtaggccaacgcttcctccccagtagctcctaggccttctcgtggccgttgttttgaaaacggcgctctgattggctaggtttccgggcccgcgcccgttgccccacgcactgaccaattggcactcatgtaacatcggacgaggcacgagtgaggggggaggcggtggcggcggccattttgagccgctgccgccattggagtgggccccccccctttcccccttcgcctcctgacaggaaaggtttaagggggacagagccctgggaggccgggccgggctcgggggccaccccgggggcccgggccatggatgtgcgccgtctgaaggtgaacgaacttcgcgaggagctgcagcgccgcggcctggacactcgaggcctcaaggccgagcttgctgagcggctgcaggcggcgttggaggccgaggagcctgacgacgagcgggagctcgacgccgacgacgaaccggggcgacccgggcacatcaacgaggaggtcgagaccgaggggggctccgagctggaggggaccgcgcagccaccgccgcccgggctgcagccgcacgcggagcccggcggctactcggggccggacggacattgtgagagtgcgcggggcgggggccggggagcccggagcctgggccgaggaaagggctgtgggacgcgggagtccagcgcctgaggtcggggagacgacctgaggatcgggggatcccgctacccgccgccgaaaaggatctggggaccagggccccagcacgaccggagggtggatcctgacactcggtgcaggggggacactgggggaggggcctctgggtttcggaggtgagggacgggggtggcggggaggattccgtaccgtagggatcggagaccggaaactgctttctggagccgaagagagtcggaagaacaagaggttttccgtttgggttggggagggtctcgaaaatggggatcctagggtacggagctccgtgggcttggcggtcgtgctagcccagcgtgtgggctggggggtggggagccgtgtttccagggtggggaaggaatgtccaggtgtgcggggctgcgagagttctgaggaaggaggatcctggaatatgccgctggatgcgatcctgggcgttctcctatttgggtacgggggtgggtgggagaggtggaggcgctggtgtctgtggctggggagggtcctaatggactcagtgctttggagtttggctagtgagcatttaggggctgcgggagattgaactagggggcacccccatctctcttccggggctggaaggccacccttgaagcaggcacagcctggacattaggtgctgggagatctggggactttctggttggcttctagaagaggtatagggagccctggtgtccagaggctggcgggggagaggatgctttcctggacaaaggatctgggggtctagagctaagaaaactgagggcaaataactcttgaggctgctgctgactggtctggagctaactgtggggtttttggagaacagagggtagctgggggtgggatgggggcagatgagttggtaacattccaagtggatgaaatatgtggcgggagacagaggatcctgtgtccagcacaggagtacgtatctggcttagcgaatatggggaggggggaggccgtagggagcaaagagaaagaaacctgttgacttcactggaggcctcagagtggagtgtggggaatgtttctggacctgagcgtctccaggagaaatctcgacggttcccagaagcagttatttgtgtacccagggagtgggggccctcggggagcagcacggaactcttcatcagccaggagctgtgactctgggaatgggttcgggtagacctgcggttgtctgaggagaggaaaacctgatatgggacggcgtgaatcttcagttagaaaaaaagcagctttcgggccgagtgcagtggctcacgcctgttattccagcactttgggaggccgaggcgggcggatcacgaggtcaggagttcaagaccagtctggccagcatagtgaaaccctgtctctactaaaaatacaaatattaaccggatctggtggtgtgcgcctgtagtcccagctactcgggaggctgaggcaggagaatcgcttgaacttgggagggggaggttgcagtcagccgagattacgccattgcactccagcctgggcaacaaaagtgaaactccgtctcaaaaaagaaaaaagcagctttctttctcttttttttaaatacagatgggggtctcgctatgttgcccagggtggtcttgaactcctgggttcaggtgatctcacctcggcctcctgaagtgctgggattacaggcgtgaatcactgcaccaggcctcagggcagctttctagtaggactgggaaatggggggactggaaaggttaaggagtaagtagaagggattctggcgtaagagtttgtggagtttttctgaaaagagggcaccctgggacttggggctaaggggataaggagagaaatgaggtaacagaagagacaggatttggggttggaattggatacttgttcataagagaatttcccggagggaggagtgtggatttggggtaggcagtggcctagagattatcgaggacccaggtgctggaaagaggacttcccattgcagagacttgtgaagaaaggagtgggcctgtgtgtgtgtctagagcaggagggatcgtggcaggaatgcctagcaagaaagggtagtgggttagtagtgacctggtggtctgggcagagagtcatctctgagaggaaagcgaattaggtgctttggagcgtagactctagactaagacagacttcgtttcaaatctggcttaaagatattggcaagtcacttcacctctgtgggcctggtttccttaatgtgtaaaatggggttaatcaacaaatagtgtgttcacagcccctccaacccctgaggggtgttatgaatgagatcacatgtgaagggcttatcactgggcctgccttttatgagaagagggatgttttagagaatggagaaggaccctagaattatagcttctccaggaggggctgcctctgtgaacacaggagagagatgctggggaaaagaggctttgtgggaagaggagcattgtgcttggagcctggaagcagcagaatagtttgaaagggccccatattccaattaaggagataatgctatttcttcctctctcccttacttgctacaacaaagtcctttgagcccccttcatgcctcccttaagccctccttcaaccttggtaaacagaccggtagcaaaccacatgacctgtgactttcctccctttgggctgcacctggtttgtgcccagatgtatttatcctctgagaaggaatccgatcagttagcaagtggcagaatagtctctccttccctttggttctggctcacggctcctggcatagccactggtagggcccttggggccctaactgagagctagcccctggggaggagagcctgtatgctgcccatcctagctttctaaagttctctctgggtttggctgcaaggttcttgagggaatttctggttttagttccacctctgagctttcacacgtgttatcccaaccccagtaacattctccattctcatcactgagtcattacctatgtatcctttgaatcaaggcttatctgttattttccaggtccctttcttcattcctggtactactttgtagccttcaacacaatcatattaaatttttgtgtgtctttaagatttgtctgtctcactaaactgaaggcttcagtggggcaagcttgtcttcagctgtatcccaggctctggagtatagtatgcatgccatgaatagttaatattattattcttaccactcttagttgagctcctggacctgcagatgccttctggacgctttggtccagggttcttcatgaaccgcccctctaattggccatttttaattttgttttaagatgccatggacaatattaccaggcagaaccaattctacgatacccaagtcatcaaacaagaaaacgagtcaggctacgagaggagaccactggaaatggagcagcagcaggcctatcgtccaggtaggaaaatacacatggttcatctctttggatggaaacaatctacatggagcctttaccccctgcttagagcgggtcttcccagagaaactgtgcatcttttttcttgggcagttcatctaaacattgtcactctggcaagaattgtttaaaggaaagatctcagtcctatttccaagtgttgggagaggggaggttccatggtatctgtaaaaaagtgatgttagtatcagccgggtgtggtggctccctcctgtaatcccagcactttgggaggccgaggcaggtggatcacctgaggtctggagttcgagaccagcctggccaatatggtgaaacccgtctctactaaaaatacaaaaattagccaggcatggtggcaggcacctgtaatcccagctacttgggaggctgaggcaggagaatcacttgaacccaggaggcggaggttgcagtgagccgagatcgcgtcattgcacttcactcagtctgggcaacaagagtgaaactgcatctcaaaaaaaaaaagatgttagtataagcaccctggagagttgagacccctagactaatacttgaatcttatttagaatcttagaatgggggagccagaaagagccttctaagtctaatctggtatttctcatgttctgaagattattgtttcaggggatattattaggggattctcagaaaagggttccttagccaaatgtgtctggaaactgtagcatgtgctatatcgtctcttggaaattcactgtgcttgttagaacattaaaggctctgagaagtccagaatttaaaaaaaaaaaaagaaagtgtgtgtcaggcctcaggccaggtgcgctggctcatacctataattccaacactttgggaggccaaggtagtaggatcatttgagaccaggagttccagaccagactgggcaacatagtgagaccccttctctacaaaaaatttaaaaattagccaggcatggctatgactgactacatgcacacacctatagttaaagctactcaggagacaaaggtaggaggatcacttgagcccaggagtttgaggctgctgtgagctatgattacactactacactccagcctgggtgacagtgcaagaccctgtcacgaaaaaaaaaaaaaaaaaaaaaacctaaaattaaaagtaggttagaacacagtggctcatgcttgtaatcctagcgctttaggaggccaagtcaggaggatcacttgagcctaggaatccaagactagcctggcaacatagtgagacccctgttgtctttagaaaaaattaaaaattgcctgagcatggtgacatgcttgtagtcccagctactcagaagactgagtcaggaggatcacttgagcccaggagttcaaggctgcagtaagctatgatcgtgcacggcactgcagcctgggcgacaggaagaccttgccttaaaaataaaaacaggccgagtgcgatggctgttacatgcctgtaatcccaacactttgggaggctgaggtgggaggattgcttgagtccaggagttcaagaccagcctgggcaacataaccctgtctctataaaaaataaaaatattacctgagcatggttgcacaatcctatagccccagctactctttttttttttttgagacgaagtctcgctcttgttccccaggctggagggcgatggcgcgatctcagctcactgcaacctccgcctctcgggttcaagcgattctcctgcctcagcctcccaagtagctgagatttcaggcgcctgccaccacacctggctaatttttgtattttcagtagtgacggggttttaccatgttggccaggctggtctcaaactcttgacctcaggtgatccgcccgcctcagcctcccaaagttctggggttacaggcgtgagccactgaacccggccaagtcccacctactctggaccctgaggtgggaggatcacttgagctaggaagttgaggctccatgagccgtgatggcagcactgcattccagcctgggcaacagtaagcctctgtctccaaaaaaattttttttttaattaaatttaaaaaccttgtgtcttcttgggctggtgttgctgaaaatattttttttaataaaaaaatagacaaaaaaccttgtgttgtatcgtttaaacttaggatttcccaatcatgttaagtatatgtctttacagaacaaagttccccatgatgccaactctcccttcccttttttttttttttttttttgagatggagtctcgctctgttgcccaggctggagtacaatggtgtgatcttggctcactgcaacctctgcctcccaggttcaagtgattctcctgcctcagcctcctaagtagttgggactacgggcgtgccaccacacccagctaattttttgtgtgtttttagtagatgtggggtttcaccatgttggccaggatggtctcaatctcctgacctcatgatctgcctgcctcggcctcccagagtgctgggattacaggtgtaagccactgcgcctggcctctcctccccattttatagattgaggagttggcttgtccgatggcagagctggggctacaacctagcatacttgctcccaggctagtcctcttggttaataagcagcattccttatcatttgtgccttactatttggaaagcagggtcccactattgagaactgatggagcccggactgacccccagttttgtgctgcttttactgtgttgtggcctcccagtgccttttcttagtgtatctggttgattttgtctaacgccattctggttcatccacaaagttaaatccccagacatttcttgtgggtggctcagaactttactgaatgtaggttaaaccgcagatttgtgtcaggctctgtgagacttgtaggatcattcagccacaggagaatattttctgtgccgttatccacagacattcatcaggagccctgtgtgagcccaacctattgctgggaaccagggaagctctcttcaggatggctgagcaccatcccagccctagagaaccaggagacttttctgagagatgtggtccacatgccgaagctggggagtgatccaaaatggtctggggttgaatgcagaaatgagtagatgtgaatgagcttcagcatcagggattaatgctgtgggagaaatgaaggtagcctacatctgtggtttgctcttggttaggcactgattcctggagtctgcctgagactaggacttacccgtggtccacagcacggtatcccatcctgactttctgttaatggtatgacttaaagaggttattgcacctatgggatggcttaaccggagtgattctggcctcttttggtagggtaactaaagcccgtagagttagctgcaggaccaca

SEQ ID NO: 82 - DNA, 16391 bp, Homo sapiens
aatgtctcaataccttggcctgcttggaacatgcctctggtgggggcagggtgggggaaagggtagccacggcagatccgaccccctaggtagccaagggtccgtttagattaccctaaagtttgtgttttgtttgtgtttagacaaaaaccgtgaggcaggagcaatgacatttgcagagcacactgtagggaagaaaatgcaggagaaatccttctctagctctgtctgtccaatttgtaactttagatctcagaaagatgaaaagccgagacaaataaatctgggtggctgaatgcagaaaaaggtgtttgttgggagaagcaaagagctgccgaccttgcagggtacactgtgctgctggccctgtcacacgatgctttatctctccatcagcgcctgaggcctaagcttggtggctgcagaatcacaaaaaaggcagtggctgagcttagcctagaaggctgtggagtgctgggcctgctgcctccccatccctctgccctgcctctcgctctctctgctccatttcctgcctcagaaccctgctctctgctcttgtctcttttggttcctctatttatacatttatgtttttggaagagggctagagggaatctaaggtttagggagctgcacaactcatgggcagatcccagaagcctggctcttctccactccagcaggcaaaattcatgtcttttctttcttttcctgtgctggacagagccaaacacacactaacagcgttaacacgataaatatcagcagtcctgacctttctctgtggatcctggaggctcgctgactcccaagctctgagttgcttgtgcttaaagtggattagcacttaccgttggctgcagggccccgcactggggtttgatgggaatcaaaatagagattaccttatttgacttaaaaaaaaatttccacttgaaagatagaattccccagagaaatccactggagcttatacatatacaactttaaattggattttaaaaatagtttgccagctgtttgctaggtcgtgttttaggctcttgtgcctgattgatgttgggtcctttgggaaacaaggccaagaggggattgaggggctgccaagcctgcagggtcctggatgcctggggactttctcaggagccctggtagctgttgccagggcctttagaagccctcagatcctggcaccgaggtctgcctctcacccagagaaaatgatcacagagctcgaaccacctcccccaaacctcgcctcatccctgcactgcccttctcagccaaggtccaaaagaaagaaacgaaggaggactgttctcagctggatggatctttcacactctgtgcagctaaatgtttattttagttccttgtatgaccttcaggtgacctttcatccatccccatctgcctgaactttcatccatctccttcctctattgctgcctgactggtgttcatcgctcaggtctcagccagagtgtcaccttctcagggaagcatgaggggcagcagagtgtggtggtcaggaacaccagtgtgtcaggctttgaatcctggttcagcacttacaagctgtgtgaccttatggatggtcactcgacccctctgtgcctatcaatttcctcttctgtgaaatggggatcatgataacacctacctcattaggattgttgcacggtgaggatccagtgaattcctacatgttgtatggaatatgtaaaatgcttagaatatggcctgccatgcaacaaacatctgctcttactactctctaaagcagggggtccccaatccgtcaccccaataccagtctgtgccctgttaggaaccaggctgcacattgggaggtgagcacaggccagtaagtaaagctttatctgtatttacagccactcccagtacgcaaacagagtttgcgttaccacctgatctctgctttttgtcagctcagcagcagcactggattctcataggagctggaaccctattgtgaactgagcacgtgagggatccaggttgtgtgctccttatgagaatctaatgcctgatgatctatcactgtctcccatcctccccatatgggaccatccagttgcaagaaaataagctcagggctcccactgattcaacattatggtgagttgtatattatttcattacatagtacaatgtaataatgatagaaataaagtgcccaggctgggcgtggtggctcacgcctgtaatcccagcactttgggaggctgaggcgcgtggatcacaaggtcaagagatcgagaccagcctggccaacatggtaaaaccccatctctactaaaaatacaaaaattagctgggtgtggtggcatgcaactgtagtcctagctactcgggtggctgaggcaggagaatcgcttgaacccgggaggtggagattgcagtgagccaagatcacggcactgcactccagcctggcgacagagcgagagtccatctcaaaaaaaaaaaaaaaaaaaagaaagaaagaaagaaagtgcacaataagtgtaatgtgcttgaatcatccacaaaccatcccccttaccaaactgtctatggagaaattatcttccacaaaactggttcctggtgccaaaaagtttagggaccactgcttgctctaaagtacgtatcccagtggtagtggtggctcacgcctgtaatccaagcactttgggaggccgaggtgggatcacttgagtccaggagtccaagaccagcctgggcaatacagcgagaccccatctgtacaaaaaatacaataaataaatgaagtacatgtcccaaggcccagttgcctgtggctgccctgtgctcctccagcctccagtgcttttgctgtgcagcatctgtccttgtttatctttattgcctggtttatgagatgctgaagaagtatttgtgactacaataatgaatgatttttttttctttttttgagacagagtttggctggagtgccagtggcatgatctcactgcaacctctgtctcctgggttcaagcgattctcctgcctcagcctcccacgtagctgggattacagatgcctgccaccatgcccagctgagttttgcattttttgtagagatggggtttcaccattttggccaggctggtcttgtactcctgacttcaggcgatctgcccgccttggcctcccaaagtggtgggattacaggcgtgagccactgtgcctggcctaaatgaaatatttttaaaaattgctaggctgggtatggtggctcacacctgcaatcccagcactttgggagactgaggtaggtggatcgcctgaggtcagagttcgagaccatcctggctaacatggtgaaaccccatctctactaaaaatgcaaaaattagctgggcacagtagtgcgcacctgtagtcctggctactcgggagactgaggcaggagaattgctcgaacctggagggtggaggttgcagtgagctgagatggagccactgcactccagcctaggtgacagagtgagactccatctcaaaaaaaaaaaaaaaaaaaaaattgctaaaagacaaatgtgatccagaagagagagaaactcgggcacttgggtcatttttctccatctatatttgctctatatgtaaacttggtccttttgtttgtttgtttgtctgactgttaaacagagagagttgatgagttttgagttctgggattaggaggataacgttttgtaatttttttttttgcaggagacctctgccacatctagtttttcaaaatttaattaaatattaaatgcttgcaaaagaagagatcacatgaacagagtataaaaactggacaccctactacccacacccagtttaagatacagattacaaccaacaccgttaaagcccttttgcatgcccttctccatcccagccccctcctaaattttgtttataatgatctcgcttttcttcataattttacctccaaaatatgcatctgtaaacaatatgctgtttttgcaagcttttgaacattatataaaataaatcatactgcatgtattcttcagtttgctattctcacctctccacatgatgtatgtgacatctctttgctgcagctgtagctctctaatattccactgtgtgacccttctgctgttttcttctccgttctcctatcaatggacatttgggttgtttgccttttttttttttttttttttgagacagggtcttgctctgtcattcaggctggagtgcagtggcaggatcatgactcactgcaacctctgcctcctgggttcaagcaatcctcccacctcagcctcccaagtagctgggaccccaggcgtgtgccactatgcccggctaatttttcttttttttttctagacgcagggtttcaccatgttgcccaggctggtctcaaactcctggactcagtgatccacctaccttggcctcccaaagtgctgggattacaggcgtgagccaccatacctggccttgagattttttgctattactggcaagtgctgctatgttttttttgtttatttgtttgttttttttgagatggagtctcgctctgtcacccaggctggagtgcagtggcacaatgttggctcactgtaacctccacccctgggttcaaatgattctcctgcctcagcctcccgagtagctgggattataggcacctgccaccacgaccggctaatttttgtatttttactagagacggggtttcaccatgttggccagactggtctggaactcctgacctcgtgatccacccgcctcggcctcccagagtgctgggattacaggcatgagccaccatgcctggccacacaaatgctgctatgaacatttttgtgtgtgactactggggtccatggtcaagagtttctctggggatatttctgggtcctaaagtttgcacattatcagcttatctttatgatgttcgattgattttccggaggagttctccaccttcccatgtagtcccaagcctcaggccctgctgcattcatctttggggtctattagacctgttggaaagggactctgaggcagggccagggagaagcttgtcagcttgtaccacagtggccacacttctgggagcaaaaggtgacaacttggcctaggtgattagggggatctcctctgtggtgttctctccatctcacaggcaccactcagagccatacagacaagagcaaactctgttgacccaaagccaaaacatcccagtgaaaactaaacaggtatctggaaacaagcagtgttttttactaatccacttattttcttttcaagctaataaaggttttaatatttcctcaactaagtgaaattggaattttaaaaaattaatttccttattatagcttgcctttaaaaatcattgctttggctgggcacagtggctcatgcctgtaatctcagcactttggaaggccaaggtgggaggatcacttgaacccaggagcttgagaccggcctgggcaacatagtgagaccctcgtctcaatttttttaaaagtcattgtttaactgggcatggtggcttgtgcctgtaatcccagctacttgggaggctgagacaggagttgctgggacctggaggttgcagtgagccaagattgcaccactgtacttcagcctgggagtcagagcaagactccgtctcaaaaaaaaaaaaaaagaaaaacacctcattgttttaaaattcaaaattgttttgatggtagtaggctttcaataaatattaaacttttttgagcattttgttacttcagtcagtaggattgttcagggatctatttgccaaagccaaaagtagaatcctttcttctatttttttctactctacacattgtctttataataataatttaaaagaaggatgtaatagtgaaaactagtgagtgaatccctaaggcctttcgtgactttctcctggaaactgacctattttgatactgtcagctcgatagggtatcctggcataacttttctgtctaggaaggagctcagtttattgaccactcatacatctttttgagaaggcacattgatccttcaagaaaatgatcctccagaaattgtgattggtacaatttgtaagcaaaacctcttgttaaaatcagtaagttaggccgagagcggtggcttatgcctctaatcccagtactttaggaggctgaagcagatggatcacttgaggccaagagttcaagaccagcctggcaacatgaaaaaactccatctctactaatacaaaaattagtcgggcgagttggcccatgtctgtaattccagctactcaggaggctgaggcacaagaaccgcttgaatctgggatatggaggttgcagtgagccaagatcataccaccatactccagcctgggtgacagagcgagactctgtctcaaaaaaagaacaaaaacaaaaaaacccaaaacagtaacttatagaaataagctagtattgtgcagaaacctagttacaccttgcctaagctaaaatcttagtcacctttgggtcactagcacactctttttctccgatcacatgcagtcataaaatcttgccaattcatcttttctgatgtttctcctgcccattccttcattgttttggggccttttccacgtcatgcctataccaaaagggactgaaacttaaaagttccctgtctgagttcctccccattctaactcaccattcctggattaatctttaaaaaataaaaactaggctgggcggggtggctcacgcctgtaatcctagcaccttgggaggctgaggcgggcggatcacctgaggtcaggagttcgagaccagcctggccaacatgccgaaaccctgtctctactaaaaatacaaaaattagccaggcgttgtggcatgcgcctgtagttccagctgctccagggactgaggcaggagaattgcttaaacctgggggcagaggttggagtgagctgagatcgcgccactgcactccagcccggctgatagagcaagactccatctcagaaaaaaataaataaataaaaataaaaactaaaagaatagcaacaacaaaacccacatctaaaaactgtttttctcatgatacctcgcttcttctccactctcaaactcattggcttccacagagtaaaattcagatcatttagccaaggcacatgaatctctccccaaactcctttgactcctatggccatctctgcagaagcttacacaaacacaccccatttgaaggacagtttcagggctcaggacccctgcagctggcgaaagaccatgggtttcaagtgcctgctctgtgacaaggctttgccttcccaggttatcatcccctctctgcactcccagccccgcaacatgccacgttcttcagacacatccagcctgtcttggcctccacagcttcattttctttttgtttcttttttttttttttttttctttgagacggagtctctctgttgcccaggctggagggcagccgcatgatctcggctcactgcaacctccgcctcctggattcaagcgattcttctgcctcagccttcggagtagctgagattacagggacgcgccagcatgccccgctaatttttgtatttttagtagtgacaagattttaccatattggccaggctggtcttgaactcctgacctcaggttatccacccatctcagcctcccaaagtgctgggattacaggcgtgagccatcatgccctgccacagctgcactttgggcatctccctgcccagaacccaccactctgctgtttccaggtcccaaccacctttcagggcctcttctcatctaaaccttctctgactaccttggcctttgtgcatctccccttcctcttgacttctgtcctggcccagaaaatacaggtcattctgtgcaggctgcccaactggattgccaggccccagagggcagggatgatggcgatcaggtggtgcaggcccttccacatcttctttgcctgtaggtgttgcctttcaggacatgatggtgaacatgatcatgcaggaaaaataaataaatgaaaaacaaacattaatacaagaatcattctctctttttctattgcagattaggccctccttctgtctcccccgaccctcgcccccccacccccaatctgctacaaaatatccagtataactcctttatcctttcgtgtgtaaaataaggaagctaaattctagagaatagagaagttgaaaaagtaaactaatacatttcctttaatgactcagcccaggaaaggtaagcaaacaacttggacttcagacagaggtcgatagctgctgatggaggtgatccaggcacttccgaggctgtgcaggaagggccaaagccggtgcctgggagagccggataggtttctgctgctaaaccaagtctgcagggtgagttgataaaggaatgctgattcccaaagaaactaagggtgccagatgggacctctgtcaccatctctgaaataccagtgggttaatattgcataagcacgaatgctttttaaaaaatgcacatacacacacatatatatgtctatacaatatatttttttgtagctggagtgtgaggagtgggaatctgtggttgtgaatccatagggtgctgagcagagtccccatatgatttgggacctgtagtgccacgacactcacctcacaatagcacaagcttcttgctctgaagggtagataaacgatgtttaaagggagagcattgcttgattttacacctttgttttaaaaaaatatgataaagggagaacaaatattattgtgggaaggacttttctgtgagaggagtaaaaccacccatcctgggctacaccgcaagtatctagttgtctttaaaggagtgaaaaaaaatctgcttcgtgttatttttttcccctatattcttgccccttcatcctgcctatctctgcaaaacctattccgccccccaccgccctttttttttttttttttgtaaacagagactggctttgtcgcccaggctggagtgcagtggcactatttcaggccactgcaacctctgcctcctggattcgagcgattctcctgcctcagcctcctgagtagctgggactacaggcgcacaccaccacacccagctaatttttgtatttttagtagagatggggtttcaccatgttggccagtctggtctcgaactcctgacctcaggtgatccaccccccgcctcagtctcccaaagtgctgggattacaggctgagcaaacttgcctggtcttaccttggtattgttttgctaaaaaatgcacagtagtcttctatttcttaatgcattgaatgcaaactttatcaagcttgactttgaagacctgggcagcccacccagtcctaacttcctagggtcatttgccccaccccacaaccagccttccccctgcacaggtgccatgtcctgtctcggacccaggctccacttgaggctcagcctctcccttgcatcctgaaaagctttttgtgtgaactgcactaattttcctcatgttacaccgagctccctagctatagagtaaagtccttgaaggcaagacctttgtcttactcgcccctgagctcacttctgtgtctggaccgtagccaacatagcatggctgaaacctcttaaaagctaggtcagggtggctcatgcctataatcccagcactttgggaggtcgaggtgagcggatcacctgaggtcaggagttcgagaccagcctggccaacatggtgaaacctcatctctacgaaaaatacaaaaattagctgggtgtggtagcgcacaccagtagtctcagctactcaggaggatgaggcaggagaatcgcttgaacccaagaggcggaggttgcagtgagcgaagatctcgccactgcactccagtctagatgacagagtgagactcggttcttaaaaaaaaaaaaattgctaggtcaattcaattgggacttctggccctctgcctggtcccctcactgtcttcctcaaagacttagggccattcccctgtgaatctcaaatcagggcagccctcagtgcctcctctccatatcttaatcagatacgaataatcagagatgacagtatttaaagaagccttgggggatcaattacaaatagcccaatttcagttacaaaggactttcactttgatctaatatttaagtgagagactctcacctgaatacagacctgataaaaaacattagaaggattaaatgctttgcttaaggtcacacagaatgcatcaaaacttgcacttaaagtggggacctatcttttaaatctagcaatatattttttccagcaccatatcttggtagccaatggtgataacaaagctgtttttgtttttctaaaatgaaaaatatactaatgtctttatttagagtttttctaataaaatacaaatcattactaccctgttgggtacaacatattaaaaatgtttttatcttagctgtcttatctgcctgggtttgggatagattttaggatttaatattattgggtcacgtaatatcattatgtttatcagagtgaaatctagtttagccttttgcgtactcaataaaaaccatcgtgaattttagaaaaactgctcagagttcatatttgagcagttgcgtattggcagcagcatcttgatataaaagacaacttgttatttttacgcattctggaattgtgaaacttagaaagcacattatgtttttttttttaaagattatgtttgtttagtgctttatatctattataatccttatgaaagccccgtgaagcaagtgtgtaagaactggcattttaggctgggcacggtggctcatgcctgtaatcccagcactttgggaggccaaggtgggcagatcacttgaggtcaggagttcaagagcagcctggcctacatggtgaaaccccgtctctactaaaaatacaaaaattagccgggcatggtggcaggtgcctgtaatcccagctactggggaggctgaggccagagaatcacttgaacctggagggtggaggttgcagtgagccgagatcttgccactgcactccagcctgggtcacagagcgagactccatctcaaaaaaacccaaaaataataaaaataaaaataaaattttaaaaaataaaaaaattaaaaataaataaagatgaagaaaccaaagccacggggcctaagtggtgtgaccagggtcactggactcattggtggctgcattggtcagggtcttggcaagaaacagagggcacactccagttgggtaatttcagcagaacctaataaaggaactctttacaaaaataggggcagggtgcagggaagccacagggacagtgtgttgttgtggggagctacataggcttgccatggagggaggaaggagggccaggtcaccagaactggagaggcctgcagtgtcagtgcacagagacctcctaggtctaagaactcaggataattaacacccaacccctctgtcctccctccttctgatcccctaaaggagaccctcgttggccttattggaagccagagggcaagggagcctgctgaggtttctacacaggtcagtctcctgggcactgaagagagagagtagggagtggctcccggatggagtaggcaacagaagatatccagcacagaggtgaatccatgagtaaacctcagacttcctttaaaaaaataatagtagggccgggcgtggtggctcatgcctgtaatcccagcactttgggaggccgaggcaggtggatcacctgaggtcaggagttcgaggccagcctggccaacgtatagtgaaaccccgtctctactaaaaaatacaaaaattagctgggcatggtggtgcacgcctgtagtcccagctacttgggaaaccaaggctggagaatcacttgaacccgggaggcagaggttacagtgagctgagatcataccactttaccccatcctgggcgacagagtgagactctaacaaagcaaaacaaaacaaaataaaaaataataggtcaggcatggtggctcatgcctgtaatctcaacaatttgaaaggccgaggcaggcggatcacttgaggccaggtgttcgagaccagcctaggcaacatagcgaaagctcgactctactaaaaatacaaaaattagccaggcatggtggcacatgcatgtcatcctagctacttgggaggctgaggcacaagaatcacttgaacccggggatagaggctgcagtgagccaagatcatgctactgcactccagcatgggtgacagaggaagactcggtctcaaaataataataataatatgataataatgaatagataattatgtgaggtgatgaatatgttaatggtcttgattgtgattgtttcataatgtatacctatatcaaaacattaagttggaccagcatgatggttgatgcctgcaatcccagcacttttcaaggctgaggtgggaggatcacttgagcctaggatttcgagaccagcctgggcaacatagtaagacctcatctctacaaaaaatcaaaaaatagccaggtgtggggcatgcacctatagtcccagctacttgggaggctgaggcaggaggatcacttgagcctgggaggtggagtttgcagtgtaaccgagattgtgccactgcagtcagcctgggcagcagagagaggccctgtctctaaaaaaatgaaaaacaggggctgggcacagtggcttatgcctgtaatcccagcactttgggaggcagaggtgggtggatcacctgaggtcaggagtttgagaccaacctggccaatgtggtgaaaccccatctctactaaaaatacaaaaattagccgggtgtggtggcaggcgcctgtaatcccagctattcgggaggctgaggcacaagaattggtggaatccgggaggcagacgttgcagtgagccaagatcgcgccattgcactccagcctgggcaacaagagcaaaactctgtctcaaaacaaaataaaagaaaaaaaaaaaaaacaaccccaccccctccaaaaaaaaaaaaccgttaagttgtacaccttaaatatgtacagttgttatttgccagttatactgaaataaagctgaaaaaaaaaactgatctcggacttcttgtcccttgatcctatgctctttccataacactgtgcctgagacacataacactgtgcctgagtcctagctcctagcacagaatttcagagaagttcccttcaggaccaccctttggcccacaacatccctcaacattaaactttaagctcgttttctaaagcgttctgtgaatattagcctctatggaaggatcccataggatccttttttgacagcgatcccatgggagctataaatcagactgggtcaggcagtggcctgtgggctaggccaagatggcagggctggcaggttgagaaaggtcccctgaagtcatcactggttcttggccatcatcacatcttggcagagatcctcagagcctttaatgcagctgtagtgggcattagccacgaggctggcaaagtttcaagaataaaagaatccattttactatcttttgcatctggcaattaaaggaccttgaacaaaagacttcatctcacagcactgttgataactctacggtttgcacttggctaccctggctttatttttatataatccctctggcatgagactccaggttttatagaaagtaaacatctcgggggtgttggagctttctaccttggatgcgttctttattcacctttatccttggttctctgagggctaaagtcataaaaagtttgatgacagtgacctcttccaaacccaagagctatgagagcagtgtactgagaaatgcaaagcccaatgttctcatggaacacaaactcacccagaggtcacagagaaaaaattctcagttcctgttctggcagaatcatttccaaagaaatgaaaccatggtcacatccagcttttatggtctgagtggtcatattcctgaaagaagcataactactagaatctaaggtgacttcactacaaggttaatacattcactcccccaactcctcacccaaataaggccttatgcactgtgcattttcccccactgctgggggaggtttttctaaatttcactcataagcagtttacctggtaccactggaattgatcaaagaggcacagagttggccgggcgtggtggctcacgcctgtaatcccagcactttgggaggccgaggtgggcggatcacgaggtcgagagatcgagaccatcctggccaacatggtgaagtgctgtaatcccagcactttgggaggccgaggtgggtggatcacctgaggtcaggagtttgagacaagaccaacctagagaaaccctgtctctactaaaaatacaaaattagccatgcatggtgacacatgcttgtaatcccagctactcgggaggctgaggcaggagaatcgcttgaacccgggaggcggaggttgcagtgagccgagatcacaccactgcactctagcctggcgatagagcaagacttcatctaaaaaataaaataaaataaaataaaataaaataaaataaaataaaataaaataaaataaaataaaatggcctggcgcggtggctcacgcctgtaatcccagcaccctgggaagccgaggtgggcggatcacaaggtcaggagatcgagaccatcctggtaacatggggaaaccctgtctctactaaaaatacaaaaaagttagccgagcgtggcggcgggcgcctgtagtcccagctgcttcggaggctgaggcaggagaatggggtgaacccgggaggcggagcttgcagtgagccgagatcctgctactgccctccagcctgggctacagtgcgagactccgtctcaaaaataaataaataaataaatacataaataaataaataaataaataaaataaaataaagaaaatggctctagcacagtggccctattgccattcctgcctcaggaattttgcacttgctgattcctctgtttggaccactcttcccccagattgccgtatatggctcactccctcacctccttcagatctttattcatatgctgctttctcagtgagactttccctggccaccctggatgccctgtttaacattgatgcttcactccggtaccccatccctcttccctgatttattcatttttttcctgtaacacttaaaccatctaacctactcccttccctattattttatttacttatttcactgtggtaaaatatacaccacacaaaaattaccattttaatagtttgtaagttttcagttcggtggcattaattacattcacattgttgtgcaaccatcaccactatccatctccagaccttttgcatcttcctcaactgttgaagctctatactctttgaacgctacctccccattccccactccccccagcccttggtaaccaccattctactttctgtctctatgaatttgactacactaggtgcctcatgtaactgtaacactaggatctttctctctctctctttttttttttttttttttgagatggattcttgctctgtcgcccaggttggagtgcagtggtgcgatcttgggtcactgcaacctccgcctcttgggttcaagcgattctcctgcctcagcctcccaagtagctggtatcacaggcacctgccaccacaccttgctaatttttgtagagacgaggtttcaccatgttagccaggctggtctcgaactcctgacctcaggcgatctgcccgcctcagcctcccaaagtgctgggattacaggcatgagccactgcgcccggccagccaccaagcctggccaatctttgtccttttatgtctggtttatttcacttagcacagtgtctttgagggtttatccatgtggtagcttgtgtcagaatttcattcctttttttttttttttttttaaggtggagtctcactctgtcacccattctggaatgcagtagcgcaatctctcggctcactgcaacctccgcctcccaggttcaagcaattgtcctttctcagcctcctgagtagctgggactacaggtgcatgctaccacacgtggctaatttttgtatttttagtacagacagggtttcactatgttgaccaggctggtcttgaactcctgactccagggggaaccacctgcctcagcctcccaaagtggtgggatcacaggcatgactcaccatgtccagccagaattctgttccttttttaagattgactagccaggc

SEQ ID NO: 83 - DNA, 201 bp, Homo sapiens
caggctggtcttgaactcctgacctcaggtgatccacccgcctcggcctcccaaagtgctgggattacaggcgtgagccaccgcgcccgcccttctgtctwtgtctttcttattcactattccagttttcttcaccttctcccttctggaaggccactcttctgggtggaggggaccagacttcagaaggtactgacctct

SEQ ID NO: 84 - DNA, 201 bp, Homo sapiens; identical to SEQ ID NO: 41

SEQ ID NO: 85 - DNA, 201 bp, Homo sapiens
ggaacaccagtccctgagatggacacacagccccgaagtacagccctccctcacacagacaaacactgagaaccacaggaagcatgctggatgcacaccaygtagacaaacatgctcagaataccagcgacacatgcactgatcacagtgcaacccagaaacaactcaactcatctgcctcatatgtaagaaacacacacg

SEQ ID NO: 86 - DNA, 201 bp, Homo sapiens; identical to SEQ ID NO: 71

SEQ ID NO: 87 - DNA, 201 bp, Homo sapiens
caaagggcccgacatgaaggaggtgttcggtaaatggaagccgatgttgttactgctctcaaccacatatgtgctagagcaccgctctgccagcaccagcycaggacacacctgccatcacttagaggaagggaaggaaacattaggagcaaaactgcacttgcgaaaagcagagtctcctgatgtgtagagcttgctggt

SEQ ID NO: 88 - DNA, 201 bp, Homo sapiens
taggtggagggatgggtgggactgatggggcagagaccagggctggtttgtttggcatcatcactgggcatccacagaccacctgcctcaggcctggcctstgtgcagcacggaggacagttcctgcctgttctgtgtttggggctcatggggattccaggagcttcatgtttcagccagtgtgtgtgagccacctgctgt

SEQ ID NO: 89 - DNA, 201 bp, Homo sapiens
tgagatccctacctcataccatatacagaggcatcaggggaaaccaaaaggagtatgtacatgaccttggggacacagaagccttctgaacaagacacackgtgaaaaccatgaaggaaaaaaaagatagctttttgaccatgacataattaaaagcatccttgtgaccacaacaccagaaccaaagttaaaagatgagag

SEQ ID NO: 90 - DNA, 201 bp, Homo sapiens
cacgtggatgtacacacatacacgccccacagtgaaggcgtgtccactgccagccagactagggccccacaaacaggcacacaacctagagacacacaacytctgctgcattgtcctgcatgctgacacccagacagacaggtgtctgtgggcatatgctgggcctcacaggacatgtgtgtgtacataggccatgtacac

SEQ ID NO: 91 - DNA, 201 bp, Homo sapiens
cagcagcgtctgctccaacagcaggaggaggaggaggcctgcttggaggaagaggaagaggaggaggacagtgacgaggaaggtgagggccagtagcaggragaccccagattccagacaccccagccctaggcctgtctgtctccacttcatggcagcaggctgggcccccaacctgcaaaagccgacattgcgtccctc

SEQ ID NO: 92 - DNA, 201 bp, Homo sapiens
atggacgcaccctgtccccctcccctgaaaacaccagcacacaatgtggacccacactcgcagctgctcacaaacacacatccacccctgctgagaacgcraaatcccctcaacgatgatgcaaaacagacccacacaactccacacactgcagtcaccagcctacatgtgggaacacagcatgcagacaccaccttagca

SEQ ID NO: 93 - DNA, 201 bp, Homo sapiens
ggacaggaagctggggctccagccggaacccaggctccccccacgacttccctctgtggccccgggccgcctgcagaggcaggggcggggcagggggaggragcggggagccccaaaccccctgccctgcccctgcggtcggccacaggcgggggcagacttgtcccgacggggctgagccacccatcgggcctgggtgcc

SEQ ID NO: 94 - DNA, 201 bp, Homo sapiens
gaaatgaaaggtaggaaatgagtgcttcccagaggaacgtcaatgcagggtcctggagagaagaagctctttactcagtttgtccttccctggctccccartgatttcttttttgatcttactctttctttgcttctgctttgtcccttccttgtctaccacagctgtgaatggaaaagctacccatctgtcttatgttgg

SEQ ID NO: 95 - DNA, 201 bp, Homo sapiens
tctttgtcttttggacataataaccagggcactaaggttgctgaggacttgccctctgcacagagagcttcaatcctgagcagctccaggctcagttcccrttcttggaaagccagtgccctggctctggtatgcacaggctcctgtaaaccagagaggttttcagttatcgcacagccatttcccaagcactttcctcat

SEQ ID NO: 96 - DNA, 201 bp, Homo sapiens
cgcctgtagtcccaagtactccaaaggctgaggcaggaggatcacttgagcacaggaatgtgaggttacttgaactgtgatcgcgccactgcattcgtctrggcgacaaagcgagaccctgtctcaaaaaaaaaaaaaaaaaaaaaaagagtcaaggcttagtaatattcctgaattcctgaaggagttaagaaaggaaaa

SEQ ID NO: 97 - DNA, 201 bp, Homo sapiens; identical to SEQ ID NO: 42

SEQ ID NO: 98 - DNA, 201 bp, Homo sapiens
ctcctcacttcccgcctcctgtcctggaggatcctcagacttggactccaaggaggaaggaccaccattttccagggaggagggggtctccagctggctgrcgttctgctgcatcagctgcaaggcggccagcttcataaagaggaggtacctggagcagaggaaacagggcagagcaggagctggacatcggggagagga

SEQ ID NO: 99 - DNA, 201 bp, Homo sapiens
cagccctggcttctggccacttttgccccggctcctcttatacacacaggaaacactgggctgaggggctgccttgaggggcaacagttgttgcaaccttygggggcagtaggacaccagcttccgaggccactcaggggagcagaagagagggctgctggccagcatgacgtaggagaacatacctaggaaagcagggag

SEQ ID NO: 100 - DNA, 201 bp, Homo sapiens
aagtcacctcctgggccagctgctccagggaaggacggcctaatatcagatttcgaagtgagatacaagtcatcaggaagctgaaaaacaggaaaaagccraccaagttcaaactcctgtttcaccagaagaatttcagctaaagcccttagaaggcacctggtcctcactcctcccacacaggcatatatgggaatctcc

SEQ ID NO: 101 - DNA, 201 bp, Homo sapiens; identical to SEQ ID NO: 50

SEQ ID NO: 102 - DNA, 201 bp, Homo sapiens
gagatcagttcagccttgtctttctgtactttatctgcaatcaataaatggagaaaatatgtgtgcgggggtgggctccacctcaaatcaaagaaatcacwgcaccaacagctcagagcttccgcccacccgggtcggctcaatgaggttgcctcaatgatctgactataggaaacatccctgcagtgcagccccctctcc

SEQ ID NO: 103 - DNA, 201 bp, Homo sapiens
aacagtaaattgtcagcatcagacatctcaccccagggttaaggtagcccagttcgccagtgcggccatcacggtaggtgatcttcacgtgctggtgggarcgggagtgcaccatcatgtcccaggaatagccatacagcccatttgtccagttgttatagccctgggaaggcagcacagaggggaatcagctcaatgctt

SEQ ID NO: 104 - DNA, 114 bp, Homo sapiens
ccacaatgattttscgtccagtcaaaccagcatcaccctgaaattacaggatttaagttactttacgcctagtgctttccaagtggattaggttgcctattctgaattcattca

SEQ ID NO: 105 - DNA, 201 bp, Homo sapiens
atgttttctaacatatcctatgtaataagcaagggcagatctcctaggacaaaatttgactgagatgtgtgtgtgttgtggaagggacgttccccacggargtcatgagtgagaggacactttaaaaggtgaatgcttggctaacatcataatgaagtcaaacttcaggaactggaaaataacagggaagaagaaagagaa

SEQ ID NO: 106 - DNA, 201 bp, Homo sapiens
aaattcagaaaaacgaacttgaattagggagatatttgttctccctcctaacaatagatgacaaagcagggagacatggattcggaatacgtttgagcatyttctacactgttgagcttttgtttcctgcgcaactcctaacagcaaaatcagataattgccattttagtcagaaaatgcttttcatttaattgtttaatc

SEQ ID NO: 107 - DNA, 201 bp, Homo sapiens
ttgggaaaattggtcagagaggtggtatactaacagtttggggaagggcagcatccttgcccatatttagaaaaatactttttcaagtgtcttctcccaartaactcttgggacttttgttaccagtcaagtaggtacagtgagtttggcaaacaacatagtggcaaagtatcttctattgtgttactatgagagaagatc

SEQ ID NO: 108 - DNA, 201 bp, Homo sapiens
cctaaaggaaaagaatggcagaggtagacatataaaagggactattggtaccagatggatttctagcaggaggaatcaccaggcaaactgtgttcctgctrttgaggatatagctcatttctaggttattctaacaggcaaggcaggtcaagtcacttttttttttttttgagaccaagtctcactctgtcacccaggctg

SEQ ID NO: 109 - DNA, 201 bp, Homo sapiens
cttttgcatcatcagtacaaatgctagctgttaaaaaggtaaatatctcagtattactacagtaattttgtctttgaagaccccaggagtttctaggccayccaccgagaactattgtcctaaaggaaaagaatggcagaggtagacatataaaagggactattggtaccagatggatttctagcaggaggaatcaccagg

SEQ ID NO: 110 - DNA, 201 bp, Homo sapiens
atcactgcaccaacagctcagagcttccgcccacccgggtcggctcaatgaggttgcctcaatgatctgactataggaaacatccctgcagtgcagccccmtctccacgatcccctaatgtcccagaacccctcagactacagtcccctaaccgcagtgttcccgaatgtcatcatcattcagaagccgcaggctgcaaat

SEQ ID NO: 111 - DNA, 201 bp, Homo sapiens
caaggaagaagtcataaagcacagactgaatcctttctctttgtcatgaggattccaatctagcagggacaaagctctagtctttccttgacaaataagakaattcagagattaagggattggaaaaaatgagaagccagcctagctttccagcaaagggtaaaaactaaaaacagaagatccagggaggcagcggagagt

SEQ ID NO: 112 - DNA, 201 bp, Homo sapiens; identical to SEQ ID NO: 99

SEQ ID NO: 113 - DNA, 201 bp, Homo sapiens; identical to SEQ ID NO: 100

SEQ ID NO: 114 - DNA, 201 bp, Homo sapiens; identical to SEQ ID NO: 50

SEQ ID NO: 115 - DNA, 201 bp, Homo sapiens
ctttgctatccctactgtcaccctcctcttttctcctgccacatcaacagcttcttgcactgcaaatgttttctggaactctccccatgactgacaggctrataaggagttattttatttgctgtttgagtcacaaataccatttttatccaatcccaactttgccttttttgtagggttactgctacattaatgttctct

SEQ ID NO: 116 - DNA, 201 bp, Homo sapiens; identical to SEQ ID NO: 103

SEQ ID NO: 117 - DNA, 114 bp, Homo sapiens; identical to SEQ ID NO: 104

SEQ ID NO: 118 - DNA, 201 bp, Homo sapiens; identical to SEQ ID NO: 105

SEQ ID NO: 119 - DNA, 201 bp, Homo sapiens
gaagcacttgctcatttttactggttattttaaaggatacaaacaaacagccagatgaagagatacatagggtgaggtctgggagggtcccaagtgtaggmgcttctgttaccatggagttggggtgtgccaccctcctggcacgtggatgagttcttattcactttcctgtcagcctccacctgttcagctctccagaaa

SEQ ID NO: 120 - DNA, 201 bp, Homo sapiens
tttggctataagaaggggcatgaatttagaggtcagaccaggctcaaggccctagctccactactgatttgatgtgtgacatggacgaataacatgccagyttcttcatctgtaaaacaggaagagaaatagagctgttgtgagtagtagatattacaacagtgcctgtcacaataaagtgtagctattgtcatcatatta

SEQ ID NO: 121 - DNA, 201 bp, Homo sapiens; identical to SEQ ID NO: 106

SEQ ID NO: 122 - DNA, 201 bp, Homo sapiens; identical to SEQ ID NO: 107

SEQ ID NO: 123 - DNA, 201 bp, Homo sapiens
aaatgtgtcctcctttgttttgatactatgaaattaataaaattaactgctactaactaaaaaatccaagtagaacacagaaaggagagtgtggcacaagrtaaggttgcagaagtagcagccaaatcacactggggccttgagtatgtagagattttagtccgtatcccgacagcaattgaaagccactgaaaagtaatt

SEQ ID NO: 124 - DNA, 201 bp, Homo sapiens
gcctcggcctcccaaagtgctgggattacaggcgtgagccaccgtgccccgcccccttctgccatctttatattcgttcattttccgtttccttcccttcytttcttgtctctccctcttgaacatttctaagcaccttgtgtgtgccaggcattcagtaacaaagcttgagcaaaacagcccaccttctcattatcatgg

SEQ ID NO: 125 - DNA, 201 bp, Homo sapiens
atgaaccactactgcctggctcctatagcctgtttattcaccacactccataccctagagataactcacatttgctgctaatcttttttggttaacttgcygaaataattcttacaaatttttacaatttcaaatgacacgagttagtacaggaaaagtataaatcccacccacagagatactcattgtaaagtttggcgt

SEQ ID NO: 126 - DNA, 201 bp, Homo sapiens
ccatagaaaatgcttgctttggccaggcatgatggctcatgcctatagtcccagcactttgggaggccgaggtaggcagctcacctgagctcagttgttcragaccaacctgagtaatatggtgaaaccccctatctacaaaaaatataaaaattagccaggtgtggtggcatgcacctgtggttccagctacctggcaag

SEQ ID NO: 127 - DNA, 201 bp, Homo sapiens; identical to SEQ ID NO: 54

SEQ ID NO: 128 - DNA, 201 bp, Homo sapiens; identical to SEQ ID NO: 59

SEQ ID NO: 129 - DNA, 201 bp, Homo sapiens
ggtaggtctcctccctgtgtgttccagccaggtagcttggttacccattctttgctgccttcttaggccagtgggaaaccttagggcagctgtgcattgaytgggtagacgccattctggagcaggtgagaaaagaatcagctttgtgggagggtggggtcctgggaagatcccaccttgggacagcttagaggaagctga

SEQ ID NO: 130 - DNA, 201 bp, Homo sapiens
cttataatcttgttccagtgggaggagccactgggtcactcactctgccttttccccaacagtctgagcacttcaagacgacatcgcagaaggtggctcgraaattctggtggaagaacgtgaagatgattgtccttatctgcgtgattgtttttatcatcatcctcttcattgtgctctttgccactggtgccttctctt

SEQ ID NO: 131 - DNA, 201 bp, Homo sapiens
tgcggaacctgcaaagtgaggtggagggagttaagaatattatgacccagaatgtggagcggatcctggcccggggggaaaacttggaacatctccgcaayaagacagaggatctggaagccacagtgagacagggagcccactgggggctggaggaaaacagggagggagggaatttctttttggtggggcaaaatggac

SEQ ID NO: 132 - DNA, 201 bp, Homo sapiens
acactgtcaaggaagatcagattttctctggcctggagccaggttagtggaaaaatcctttgccttgggccccctgctctggttcactggggcagtcctcygatcactgactgggatcaattacctctgcggtagcccctaaagggaaatgcagaattgctgaactctggaagggaaggagaggtttggtgagccatcatt

SEQ ID NO: 133 - DNA, 201 bp, Homo sapiens
aaggtttataagagaaccagaagttggttctctgtgataatgtagttctgacccatgccactggcctatttttggaggtcaagcggggaggagctaaatamtatttttctctccttgttcaaaaaccttgtcatgaagcctccgagatgagacatcagccagggaggactagtcctccatttcccccaacacccaggcggg

SEQ ID NO: 134 - DNA, 201 bp, Homo sapiens
tcaacggctccaggcgccttctgggatacttggttgcctgttgttctgggtcacagcaatggcattgcggccagggccgtgctccggcagctggcttagarggacagatgggtggggctgggtgagggtgttctgctggccagcacagacactttcaaccagggtcccaagaaatcaggaaaggggggtggctctgggaat

SEQ ID NO: 135 - DNA, 201 bp, Homo sapiens
aactcttggctcttgggtattgctcccttgtctccctggggctcattgcctgtttctgtagcttaattgtagcttaatttggggagcatggccccgggaawtttttttttttttttagacagagcctcactctgttgcccaggttagagtgagtgcaatcttggctcactgcaaacttcacctcctgggttcaaacgattc

SEQ ID NO: 136 - DNA, 201 bp, Homo sapiens
tgcttctgcatgttttatttgtcttttctctgtccttgtcttctgggacttagcaaggcctctgggtctcagttgtcctgagggggcaagcatctctcctyggcatcccatggctgggcacagtcagtcagtcagtgtcacaggacagggccaatggctcttcttcccctctgtgcacaataagcctttctgtcttcaggc

SEQ ID NO: 137 - DNA, 201 bp, Homo sapiens
cagtgcccagtccgccttggtttgcagggagggttcttgctatctctgttcctgtttcctccacaggctttccagaattggaaacaacctgttgtcaggargaaggggaagggttgagagtcagggtttgggactagattggcaagtcaggctctggaagaatcatgctctgaaatttggggagggaggaggaaaggtcag

SEQ ID NO: 138 - DNA, 201 bp, Homo sapiens
aaaaataaaaataaaaatatcacaagggtcttttctgacctttcctcctccctccccaaatttcagagcatgattcttccagagcctgacttgccaatctrgtcccaaaccctgactctcaacccttccccttcttcctgacaacaggttgtttccaattctggaaagcctgtggaggaaacaggaacagagatagcaaga

SEQ ID NO: 139 - DNA, 201 bp, Homo sapiens
atatcctcagtctcagtcactcagctggtgagtggcagaagcaggatttcaacagacgggtgcaaagcagagccctgctcctagtctctgagctgagtgcygacttagggaggcaatgttataccggtacttgcgcccattcatctgacgacagttagaacagtttcttggatactagacaggagatggggagacaaggag

SEQ ID NO: 140 - DNA, 201 bp, Homo sapiens
tttttgattacagaagtaatacatgaaaacattctctttgtaaacatttcaagcattttacaaaaagcttaagtctgcctgaggccttaccctccccagayctctgagcccaagtctccagttcccccaccacttggtctaattaaccccgtgttgccgcacaggaggaagccagtgaaggtggaggaaatgatcgtgtgc

SEQ ID NO: 141 - DNA, 201 bp, Homo sapiens
tgacagtgtgcctatgcagacagagggagcagtgaatagcaatagggtgtttccaccatggtcttcactcaggccccggctgaaatcatgggccacctccrgatacgcagcctcctggcccggcagtgcctggcagagtttctgggtgtgtttgtactcatggtaggtaggatcactgcgggaaggaaagaagggggttgg

SEQ ID NO: 142 - DNA, 201 bp, Homo sapiens
gtgcatcgttggacgcctcccctgggtcaagctccccatttacatcttggtgcagttgctgtctgctttctgtgcttcgggagccacctatgttctctacyatggtgacagagggaacagagggagctgtgccttgagagcacctgtgggtgggcaggggtgcctcagaatggttttggatgaatgagcaaagagggaaat

SEQ ID NO: 143 - DNA, 201 bp, Homo sapiens
gaggcgggggaaggtgtcttacctttcagttttcttcttttcagttccgccacaagagcgataaccaggtgaataaccgccagtctcaggtgctgatcaayggaatgtgagtgcctgttggagacaagagctctggggacgaagggggtcccttaggaacctctttagctcctgacagcctcttcactgtcttctcgttgc

SEQ ID NO: 144 - DNA, 201 bp, Homo sapiens
cccaggacagtggtagagcccacagggttacataaatcataatggtagccctcaagaacttcataaactgtatatggtattttaaaaagttgcatattgtytgtttccacctactagaacataagctctagaagggcagagactatgttttgttcaccactgtttctccagtgtctagacgtagattctttgaatgcattt

SEQ ID NO: 145 - DNA, 201 bp, Homo sapiens; identical to SEQ ID NO: 141

SEQ ID NO: 146 - DNA, 201 bp, Homo sapiens; identical to SEQ ID NO: 142

SEQ ID NO: 147 - DNA, 201 bp, Homo sapiens; identical to SEQ ID NO: 143

SEQ ID NO: 148 - DNA, 201 bp, Homo sapiens
cctctgctgactttgttccactttctcttggtttaactgctgcctctctggttgatccttctgtctccttccttggagctccttcctctgttcttcttccyaccatgccccaggactccatacttggctctaagcttttctcttctgtgcagggtccttgaaggtccccatgcaaacccatggtttaaataagatttgttt

SEQ ID NO: 149 - DNA, 201 bp, Homo sapiens; identical to SEQ ID NO: 144

SEQ ID NO: 150 - DNA, 201 bp, Homo sapiens; identical to SEQ ID NO: 83

SEQ ID NO: 151 - DNA, 201 bp, Homo sapiens; identical to SEQ ID NO: 71

SEQ ID NO: 152 - DNA, 201 bp, Homo sapiens
actaccgccagggacgtatcgccaagatgccagtcaagtggattgccattgagagtctagctgaccgtgtctacaccagcaagagcgatgtggtaggtgcrctcccgccaagagtggggaaccatgggagggcatggcctgaccatcacacactatgcctgggtggctgtggatgcaagggtcacagggacatgtgggctt

SEQ ID NO: 153 - DNA, 201 bp, Homo sapiens
atccccatagatggcctcaaactgctgaggctccctataaccctctaaaatgcccccagtcccctgagtgtcctaaaatgtccccaggcttccagaatgcmccccttctgagtccctgctcaatctcccacccctcattttgctgccctaggtatgccttgatgtcgcggtgctgggagctaaatccccaggaccggccaa

SEQ ID NO: 154 - DNA, 201 bp, Homo sapiens
tacctgtatgttggggaaggatgcacttcaatctggaaagctgtccacattctactccctgcatctactgtcctcacatttgactcccagtgcctatggcragagttggcaatcatattcctttggctttttctcctaggattttgaatgtggaaatgacgtggaactgtcttttaccaagaatggaaagtggatgggcat

SEQ ID NO: 155 - DNA, 201 bp, Homo sapiens
cttgtctccttttagctgtgatgtggccccattccctggcaattcagttcccccatcagaaaaaagaagggcttggtagggtcttggaattctgtcctcaytagagagggtagaaatgaacacacagatagacaaaaagacatacaagcaaagagatgcaggttctcagaaacccccagtgaggaactggcatacagatcc

SEQ ID NO: 156 - DNA, 201 bp, Homo sapiens
acaagagcgagactccgtctcaaaaaaaaaaaaaaaaaaaaaagaacaacaaaaaaaagaactggatgcgtctgatctgacgcacgcctgtttgtttacgwctgcggggtgtgcctttgtctgagtagagatagtgtgtggcttttgcgggcttaacgtgtggctcaggaggcagtgggagtctgcatcatgtatcccgat

SEQ ID NO: 157 - DNA, 201 bp, Homo sapiens
ttcttgagggaatttctggttttagttccacctctgagctttcacacgtgttatcccaaccccagtaacattctccattctcatcactgagtcattacctrtgtatcctttgaatcaaggcttatctgttattttccaggtccctttcttcattcctggtactactttgtagccttcaacacaatcatattaaatttttgt

SEQ ID NO: 158 - DNA, 201 bp, Homo sapiens
tatcccaggctctggagtatagtatgcatgccatgaatagttaatattattattcttaccactcttagttgagctcctggacctgcagatgccttctggaygctttggtccagggttcttcatgaaccgcccctctaattggccatttttaattttgttttaagatgccatggacaatattaccaggcagaaccaattcta

SEQ ID NO: 159 - DNA, 201 bp, Homo sapiens
aaaaaaaaaaattaatttgaaactgctgaggatatggaccctatccctagcaaatacacatccccaccaaagacatgtgttgacaatttctgaggataccsctgaagccccatccttggatcccaccagataaagaaccccagttcctctctgaggtcatacaggccaatttgcaatactgcacatcctccctactcaaag

SEQ ID NO: 160 - DNA, 201 bp, Homo sapiens
atagaactaggctgaagtggaacaggtacaaggattaggtatatgccactgtctctgtcatgctgtattcaactgagaggactatggtcatgaaacaactkttctgtgaagaatcaattcttatccttcatcttttaggagagggtccaaaattctctttaggaatctattccctttctgtaaaaaggatcagtgtctcct

SEQ ID NO: 161 - DNA, 201 bp, Homo sapiens
aaaaaaattaatagcctactgataacataaacagtcaattaacacataggctagtgtctacaatttttatgcactcatatgacatacctaacttttccttwttttttttttcagtatttctagtcatagggatctgagagttttttcaaattgttgcaagtgtccacaaatattttcagtatattgaatgaaaaaagtaca

SEQ ID NO: 162 - DNA, 201 bp, Homo sapiens
attcctgcggtaaattagagtccctcacatgccgaggtaggccgtgtcccctcccaccacttcagtcccagccccttatttctagcacagtgcctgacatyttgcagtgatagctcacattccttgtgtgctcactgtgtattaaatgtactagcccatttaacagttagaataaacataggctgtataaaatattattac

SEQ ID NO: 163 - DNA, 201 bp, Homo sapiens
attcttaatggccttacaaactcgccactcccccctagtcgggcatttaagatgcatctgtgtttaccaaattctaaatgtactgattagatacaattcaygtccttgtgtgtgcagctctgttcctatttcatacttaaagaaagttgtaccacttctacccactccatggggccagtcccagtacacagccttccctgg

SEQ ID NO: 164 - DNA, 201 bp, Homo sapiens
aagagtggaggtggggacagcgtttggctttgtcagaatggtagtttgcttgttagaaaggaatcgccagagaccgagttgccttcacataggaatgaggwtcctacacaaaacagttgagcacaggatagtctaaaagccatccgtggttatccccccagctcatattgtgtacaatcagtgttctctccgctttgaaga

SEQ ID NO: 165 - DNA, 201 bp, Homo sapiens; identical to SEQ ID NO: 87

SEQ ID NO: 166 - DNA, 201 bp, Homo sapiens; identical to SEQ ID NO: 88

SEQ ID NO: 167 - DNA, 201 bp, Homo sapiens; identical to SEQ ID NO: 89

SEQ ID NO: 168 - DNA, 201 bp, Homo sapiens
tgattctcagcacctcaattccaaagtgcctgagaagccatctctgagtctacccacttccaaggacaaaggccagctatttataagtccaatctgctccrcctccattcctctcatcccatgaagctgcaggggctagccgtcttggcagcattgcttctcttctctgtcccctcatcaggacattgacagggcagttgt

SEQ ID NO: 169 - DNA, 201 bp, Homo sapiens; identical to SEQ ID NO: 94

SEQ ID NO: 170 - DNA, 201 bp, Homo sapiens; identical to SEQ ID NO: 95

SEQ ID NO: 171 - DNA, 201 bp, Homo sapiens
gtagttgttacagaataaatgaatgtggtccctgcatggctcttcagctgttcctgaattacttccccctcatcttttatgcctcagccaatctgaccttrtgttctgtcactgctaggcttatatacaagcaactgagaaacctcagaaacttgcttctaggtaggtcatcttactgaattatgatagagtgtccttgtc

SEQ ID NO: 172 - DNA, 201 bp, Homo sapiens
ggttggactcagagctgaaaagctgctctgagtgtgaggtgaggggtgttggtgtgacctaagttgaagtcggagaggctacctaaatctcagaaagattscatcttcttcttaagtgaggccagaataggggaaaaggaggcttttcttacagcagaaaaggacactaggcgcttcttggggagtgcactgtgccaccaa

SEQ ID NO: 173 - DNA, 201 bp, Homo sapiens
agctgaaaagctgctctgagtgtgaggtgaggggtgttggtgtgacctaagttgaagtcggagaggctacctaaatctcagaaagattcatcttcttcttragtgaggccagaataggggaaaaggaggcttttcttacagcagaaaaggacactaggcgcttcttggggagtgcactgtgccaccaagtgttcttttttt

SEQ ID NO: 174 - DNA, 201 bp, Homo sapiens; identical to SEQ ID NO: 96

SEQ ID NO: 175 - DNA, 201 bp, Homo sapiens
taccagctatgcgatctcaggcaaatgactttccctctctgagcctcccacctgtcatctggaaaaaaggaccctaatgtccccaccttccaaagctgttktgaggcaaagcacttcatgctgagggtggcaagtaggacatgcttgttaatgtggagtaggactatattatttccattatcagagagggcaggagccatt

SEQ ID NO: 176 - DNA, 201 bp, Homo sapiens
attgtgtggttatgggggttttgtggttccatgtggcagggctatacagatgtgtacaccagtggtggccccctccactctgagtgtgccattcctcgggyggaataggtatgggaacctgtgccgctatgcagagcttgacacttgttgccaggaaacacacataaaataataagtgacaggccgggcacggtggctcgt

SEQ ID NO: 177 - DNA, 201 bp, Homo sapiens; identical to SEQ ID NO: 152

SEQ ID NO: 178 - DNA, 201 bp, Homo sapiens; identical to SEQ ID NO: 153

SEQ ID NO: 179 - DNA, 201 bp, Homo sapiens; identical to SEQ ID NO: 155

SEQ ID NO: 180 - DNA, 201 bp, Homo sapiens; identical to SEQ ID NO: 156

SEQ ID NO: 181 - DNA, 201 bp, Homo sapiens; identical to SEQ ID NO: 157

SEQ ID NO: 182 - DNA, 201 bp, Homo sapiens; identical to SEQ ID NO: 158

SEQ ID NO: 183 - DNA, 201 bp, Homo sapiens
ctgacccagtctgatttatagctcccatgggatcgctgtcaaaaaaggatcctatgggatccttccatagaggctaatattcacagaacgctttagaaaaygagcttaaagtttaatgttgagggatgttgtgggccaaagggtggtcctgaagggaacttctctgaaattctgtgctaggagctaggactcaggcacagt

SEQ ID NO: 184 - DNA, 201 bp, Homo sapiens
ctttggaaatgattctgccagaacaggaactgagaattttttctctgtgacctctgggtgagtttgtgttccatgagaacattgggctttgcatttctcaktacactgctctcatagctcttgggtttggaagaggtcactgtcatcaaactttttatgactttagccctcagagaaccaaggataaaggtgaataaagaa

SEQ ID NO: 185 - DNA, 201 bp, Homo sapiens
ttaaatattagatcaaagtgaaagtcctttgtaactgaaattgggctatttgtaattgatcccccaaggcttctttaaatactgtcatctctgattattcktatctgattaagatatggagaggaggcactgagggctgccctgatttgagattcacaggggaatggccctaagtctttgaggaagacagtgaggggacca

SEQ ID NO: 186 - DNA, 201 bp, Homo sapiens
atgacttcaggggacctttctcaacctgccagccctgccatcttggcctagcccacaggccactgcctgacccagtctgatttatagctcccatgggatckctgtcaaaaaaggatcctatgggatccttccatagaggctaatattcacagaacgctttagaaaacgagcttaaagtttaatgttgagggatgttgtggg

SEQ ID NO: 187 - DNA, 201 bp, Homo sapiens
cggaggttgcagtgagcgaagatctcgccactgcactccagtctagatgacagagtgagactcggttcttaaaaaaaaaaaaattgctaggtcaattcaaytgggacttctggccctctgcctggtcccctcactgtcttcctcaaagacttagggccattcccctgtgaatctcaaatcagggcagccctcagtgcctcc

SEQ ID NO: 188 - DNA, 15 bp, Homo sapiens
gtcctactgcccccg

SEQ ID NO: 189 - DNA, 16 bp, Homo sapiens
tgtcctactgccccca

SEQ ID NO: 190 - DNA, 18 bp, Homo sapiens
ccccggctcctcttatac

SEQ ID NO: 191 - DNA, 16 bp, Homo sapiens
tgatgcagcagaacgt

SEQ ID NO: 192 - DNA, 15 bp, Homo sapiens
gatgcagcagaacgc

SEQ ID NO: 193 - DNA, 20 bp, Homo sapiens
tgctaccctcctcctcactt

SEQ ID NO: 194 - DNA, 20 bp, Homo sapiens
aggttcccatacctattccg

SEQ ID NO: 195 - DNA, 21 bp, Homo sapiens
caggttcccatacctattcca

SEQ ID NO: 196 - DNA, 19 bp, Homo sapiens
ggcgtggctgtgaattgtg

SEQ ID NO: 197 - DNA, 18 bp, Homo sapiens
ggagggttgtccctgaag

SEQ ID NO: 198 - DNA, 18 bp, Homo sapiens
ggagggttgtccctgaaa

SEQ ID NO: 199 - DNA, 25 bp, Homo sapiens
ggtggaagaacgtgaagatgattgt

SEQ ID NO: 200 - DNA, 17 bp, Homo sapiens
ttctggggcatacaacg

SEQ ID NO: 201 - DNA, 18 bp, Homo sapiens
cttctggggcatacaaca

SEQ ID NO: 202 - DNA, 19 bp, Homo sapiens
agggacaaccctccataaa

SEQ ID NO: 203 - DNA, 18 bp, Homo sapiens
agaatggcgtctacccag

SEQ ID NO: 204 - DNA, 18 bp, Homo sapiens
agaatggcgtctacccaa

SEQ ID NO: 205 - DNA, 24 bp, Homo sapiens
caggtagcttggttacccattctt

SEQ ID NO: 206 - DNA, 24 bp, Homo sapiens
cctcaacattaaactttaagctcg

SEQ ID NO: 207 - DNA, 25 bp, Homo sapiens
ccctcaacattaaactttaagctca

SEQ ID NO: 208 - DNA, 26 bp, Homo sapiens
actgcctgacccagtctgatttatag

SEQ ID NO: 209 - DNA, 15 bp, Homo sapiens
ggaggctgcgtatcc

SEQ ID NO: 210 - DNA, 16 bp, Homo sapiens
aggaggctgcgtatct

SEQ ID NO: 211 - DNA, 21 bp, Homo sapiens
gtagctgtgcagtgacagtgt

SEQ ID NO: 212 - DNA, 22 bp, Homo sapiens
ggagccacctatgttctctact

SEQ ID NO: 213 - DNA, 21 bp, Homo sapiens
gagccacctatgttctctacc

SEQ ID NO: 214 - DNA, 20 bp, Homo sapiens
tccctctttgctcattcatc

SEQ ID NO: 215 - DNA, 21 bp, Homo sapiens
aacaggagtttgaacttggtt

SEQ ID NO: 216 - DNA, 21 bp, Homo sapiens
aacaggagtttgaacttggtc

SEQ ID NO: 217 - DNA, 23 bp, Homo sapiens
cagggaaggacggcctaatatca

SEQ ID NO: 218 - DNA, 19 bp, Homo sapiens
ccaccttccaaagctgttg

SEQ ID NO: 219 - DNA, 19 bp, Homo sapiens
ccaccttccaaagctgttt

SEQ ID NO: 220 - DNA, 21 bp, Homo sapiens
gctcctgccctctctgataat

SEQ ID NO: 221 - DNA, 16 bp, Homo sapiens
cccgcccttctgtcta

SEQ ID NO: 222 - DNA, 16 bp, Homo sapiens
cccgcccttctgtctt

SEQ ID NO: 223 - DNA, 18 bp, Homo sapiens
ggaagtgccccaaagaga

SEQ ID NO: 224 - DNA, 20 bp, Homo sapiens
actcttggctttctgagagg

SEQ ID NO: 225 - DNA, 21 bp, Homo sapiens
cactcttggctttctgagaga

SEQ ID NO: 226 - DNA, 19 bp, Homo sapiens
cagtccccaaatcactgaa

SEQ ID NO: 227 - DNA, 21 bp, Homo sapiens
ttctgagcatgtttgtctacg

SEQ ID NO: 228 - DNA, 24 bp, Homo sapiens
gtattctgagcatgtttgtctaca

SEQ ID NO: 229 - DNA, 19 bp, Homo sapiens
gacacacagccccgaagta

SEQ ID NO: 230 - DNA, 16 bp, Homo sapiens
gctgggggtccagaaa

SEQ ID NO: 231 - DNA, 16 bp, Homo sapiens
gctgggggtccagaag

SEQ ID NO: 232 - DNA, 21 bp, Homo sapiens
ggtggattcacagagaagatc

What is claimed is:

1. A method for identifying an individual who has an altered risk for developing CHD, comprising detecting a single nucleotide polymorphism (SNP) in any one of the nucleotide sequences of SEQ ID NOS: 1-20 and SEQ ID NOS: 41-71, SEQ ID NOS: 72-82, SEQ ID NOS: 83-187 in said individual's nucleic acids, wherein the SNP is as specified in Table 1 and Table 2, respectively, and the presence of the SNP is correlated with an altered risk for MI in said individual.

2. The method of claim 1 in which the altered risk is an increased risk.

3. The method of claim 1 in which the altered risk is a decreased risk.

4. The method of claim 1 in which detection is carried out by a process selected from the group consisting of: allele-specific probe hybridization, allele-specific primer extension, allele-specific amplification, sequencing, 5′ nuclease digestion, molecular beacon assay, oligonucleotide ligation assay, size analysis, and single-stranded conformation polymorphism.

5. An isolated nucleic acid molecule comprising at least 8 contiguous nucleotides wherein one of the nucleotides is a single nucleotide polymorphism (SNP) selected from any one of the nucleotide sequences in SEQ ID NOS: 1-20 and SEQ ID NOS: 41-71, SEQ ID NOS: 72-82, SEQ ID NOS: 83-187, or a complement thereof, wherein the SNP is as specified in Table 1 and Table 2, respectively.

6. An isolated nucleic acid molecule that encodes any one of the amino acid sequences in SEQ ID NOS: 21-40.

7. An isolated polypeptide comprising an amino acid sequence selected from the group consisting of SEQ ID NOS: 21-40.

8. An antibody that specifically binds to a polypeptide of claim 7, or an antigen-binding fragment thereof.

9. An amplified polynucleotide containing a single nucleotide polymorphism (SNP) selected from any one of the nucleotide sequences of SEQ ID NOS: 1-20 and SEQ ID NOS: 41-71, SEQ ID NOS: 72-82, SEQ ID NOS: 83-187, or a complement thereof, wherein the amplified polynucleotide is between about 16 and about 1,000 nucleotides in length.

10. The amplified polynucleotide of claim 9 in which the nucleotide sequence comprises any one of the nucleotide sequences of SEQ ID NOS: 1-20 and SEQ ID NOS: 41-71, SEQ ID NOS: 72-82, SEQ ID NOS: 83-187, wherein the SNP is as specified in Table 1 and Table 2, respectively.

11. An isolated polynucleotide which specifically hybridizes to a nucleic acid molecule containing a single nucleotide polymorphism (SNP) in any one of the nucleotide sequences in SEQ ID NOS: 1-20 and SEQ ID NOS: 41-71, SEQ ID NOS: 72-82, SEQ ID NOS: 83-187, wherein the SNP is as specified in Table 1 and Table 2, respectively.

12. The polynucleotide of claim 11 that is 8-70 nucleotides in length.

13. The polynucleotide of claim 11 that is an allele-specific probe.

14. The polynucleotide of claim 11 that is an allele-specific primer.

15. The polynucleotide of claim 11, wherein the polynucleotide comprises a nucleotide sequence selected from the group consisting of the primer sequences set forth in Table 3 and Table 4 (SEQ ID NOS: 188-232).

16. A kit for detecting a single nucleotide polymorphism (SNP) in a nucleic acid, comprising the polynucleotide of claim 11, a buffer, and an enzyme.

17. A method of detecting a variant polypeptide, comprising contacting a reagent with a variant polypeptide encoded by a nucleotide sequence containing a single nucleotide polymorphism (SNP) in any one of the nucleotide sequences of SEQ ID NOS: 1-20 and SEQ ID NOS: 41-71, SEQ ID NOS: 72-82, SEQ ID NOS: 83-187 in a test sample, wherein the SNP is as specified in Table 1 and Table 2, respectively, and detecting the binding of the reagent to the polypeptide.

18. A method for identifying an agent useful in therapeutically or prophylactically treating MI, comprising contacting the polypeptide of claim 7 with a candidate agent under conditions suitable to allow formation of a binding complex between the polypeptide and the candidate agent, and detecting the formation of the binding complex, wherein the presence of the complex identifies said agent.

19. A method for identifying an individual who is in need of receiving treatment for MI, comprising detecting a single nucleotide polymorphism (SNP) in a sample from said individual in any one of the nucleic acid sequences of SEQ ID NOS: 1-20 and SEQ ID NOS: 41-71, SEQ ID NOS: 72-82, SEQ ID NOS: 83-187, wherein the SNP is as specified in Table 1 and Table 2, respectively, and treating that individual with a therapeutic agent.

20. The method of claim 19, wherein the therapeutic agent is a statin.
